United States Patent Application Publication US 2026/0265783 A1, published September 10, 2026 (application 19/167,667).

The application's sequence listing, which the Patent Office published only in electronic form, follows.

SEQUENCE LISTING (24200 sequences)

SEQ ID NO: 1 - RNA, 20 nt, synthetic construct
  source 1..20: mol_type = other RNA
aaaagccccatccttaggcc

SEQ ID NO: 2 - RNA, 20 nt, synthetic construct
  source 1..20: mol_type = other RNA
aaaagtacccagaaccagag

SEQ ID NO: 3 - RNA, 20 nt, synthetic construct
  source 1..20: mol_type = other RNA
aaagccccatccttaggcct

SEQ ID NO: 4 - RNA, 20 nt, synthetic construct
  source 1..20: mol_type = other RNA
aaagtacccagaaccagagc

SEQ ID NO: 5 - RNA, 20 nt, synthetic construct
  source 1..20: mol_type = other RNA
aacaggaggtgggggttaga

SEQ ID NO: 6 - RNA, 20 nt, synthetic construct
  source 1..20: mol_type = other RNA
aaccagagccacattaaccg

SEQ ID NO: 7 - RNA, 20 nt, synthetic construct
  source 1..20: mol_type = other RNA
aacccccacctcctgttagg

SEQ ID NO: 8 - RNA, 20 nt, synthetic construct
  source 1..20: mol_type = other RNA
aaccggccctgggaatataa

SEQ ID NO: 9 - RNA, 20 nt, synthetic construct
  source 1..20: mol_type = other RNA
aagccccatccttaggcctc

SEQ ID NO: 10 - RNA, 20 nt, synthetic construct
  source 1..20: mol_type = other RNA
aaggaatctgcctaacagga

SEQ ID NO: 11 - RNA, 20 nt, synthetic construct
  source 1..20: mol_type = other RNA
aaggaggaggcctaaggatg

SEQ ID NO: 12 - RNA, 20 nt, synthetic construct
  source 1..20: mol_type = other RNA
aaggatggggcttttctgtc

SEQ ID NO: 13 - RNA, 20 nt, synthetic construct
  source 1..20: mol_type = other RNA
aaggtggtcccagctcgggg

SEQ ID NO: 14 - RNA, 20 nt, synthetic construct
  source 1..20: mol_type = other RNA
aagtacccagaaccagagcc

SEQ ID NO: 15 - RNA, 20 nt, synthetic construct
  source 1..20: mol_type = other RNA
aatataaggtggtcccagct

SEQ ID NO: 16 - RNA, 20 nt, synthetic construct
  source 1..20: mol_type = other RNA
aatatcaggagactaggaag

SEQ ID NO: 17 - RNA, 20 nt, synthetic construct
  source 1..20: mol_type = other RNA
aatcctgtccctagtggccc

SEQ ID NO: 18 - RNA, 20 nt, synthetic construct
  source 1..20: mol_type = other RNA
aatctgcctaacaggaggtg

SEQ ID NO: 19 - RNA, 20 nt, synthetic construct
  source 1..20: mol_type = other RNA
aatgtggctctggttctggg

SEQ ID NO: 20 - RNA, 20 nt, synthetic construct
  source 1..20: mol_type = other RNA
acagaaaagccccatcctta

SEQ ID NO: 21 - RNA, 20 nt, synthetic construct
  source 1..20: mol_type = other RNA
acagataaaagtacccagaa

SEQ ID NO: 22 - RNA, 20 nt, synthetic construct
  source 1..20: mol_type = other RNA
acaggaggtgggggttagac

SEQ ID NO: 23 - RNA, 20 nt, synthetic construct
  source 1..20: mol_type = other RNA
acaggattggtgacagaaaa

SEQ ID NO: 24 - RNA, 20 nt, synthetic construct
  source 1..20: mol_type = other RNA
acagtggggccactagggac

SEQ ID NO: 25 - RNA, 20 nt, synthetic construct
  source 1..20: mol_type = other RNA
acattaaccggccctgggaa

SEQ ID NO: 26 - RNA, 20 nt, synthetic construct
  source 1..20: mol_type = other RNA
accaatcctgtccctagtgg

SEQ ID NO: 27 - RNA, 20 nt, synthetic construct
  source 1..20: mol_type = other RNA
accaccttatattcccaggg

SEQ ID NO: 28 - RNA, 20 nt, synthetic construct
  source 1..20: mol_type = other RNA
accagagccacattaaccgg

SEQ ID NO: 29 - RNA, 20 nt, synthetic construct
  source 1..20: mol_type = other RNA
acccaatatcaggagactag

SEQ ID NO: 30 - RNA, 20 nt, synthetic construct
  source 1..20: mol_type = other RNA
acccagaaccagagccacat

SEQ ID NO: 31 - RNA, 20 nt, synthetic construct
  source 1..20: mol_type = other RNA
accccacagtggggccacta

SEQ ID NO: 32 - RNA, 20 nt, synthetic construct
  source 1..20: mol_type = other RNA
acccccacctcctgttaggc

SEQ ID NO: 33 - RNA, 20 nt, synthetic construct
  source 1..20: mol_type = other RNA
accggccctgggaatataag

SEQ ID NO: 34 - RNA, 20 nt, synthetic construct
  source 1..20: mol_type = other RNA
acctcctgttaggcagattc

SEQ ID NO: 35 - RNA, 20 nt, synthetic construct
  source 1..20: mol_type = other RNA
accttatattcccagggccg

SEQ ID NO: 36 - RNA, 20 nt, synthetic construct
  source 1..20: mol_type = other RNA
actaggaaggaggaggccta

SEQ ID NO: 37 - RNA, 20 nt, synthetic construct
  source 1..20: mol_type = other RNA
actagggacaggattggtga

SEQ ID NO: 38 - RNA, 20 nt, synthetic construct
  source 1..20: mol_type = other RNA
actgtggggtggaggggaca

SEQ ID NO: 39 - RNA, 20 nt, synthetic construct
  source 1..20: mol_type = other RNA
acttttatctgtcccctcca

SEQ ID NO: 40 - RNA, 20 nt, synthetic construct
  source 1..20: mol_type = other RNA
agaaaagccccatccttagg

SEQ ID NO: 41 - RNA, 20 nt, synthetic construct
  source 1..20: mol_type = other RNA
agaaccagagccacattaac

SEQ ID NO: 42 - RNA, 20 nt, synthetic construct
  source 1..20: mol_type = other RNA
agacccaatatcaggagact

SEQ ID NO: 43 - RNA, 20 nt, synthetic construct
  source 1..20: mol_type = other RNA
agactaggaaggaggaggcc

SEQ ID NO: 44 - RNA, 20 nt, synthetic construct
  source 1..20: mol_type = other RNA
agagccacattaaccggccc

SEQ ID NO: 45 - RNA, 20 nt, synthetic construct
  source 1..20: mol_type = other RNA
agataaaagtacccagaacc

SEQ ID NO: 46 - RNA, 20 nt, synthetic construct
  source 1..20: mol_type = other RNA
agataaggaatctgcctaac

SEQ ID NO: 47 - RNA, 20 nt, synthetic construct
  source 1..20: mol_type = other RNA
agccacattaaccggccctg

SEQ ID NO: 48 - RNA, 20 nt, synthetic construct
  source 1..20: mol_type = other RNA
agccccatccttaggcctcc

SEQ ID NO: 49 - RNA, 20 nt, synthetic construct
  source 1..20: mol_type = other RNA
agctcggggacacaggatcc

SEQ ID NO: 50 - RNA, 20 nt, synthetic construct
  source 1..20: mol_type = other RNA
agctgggaccaccttatatt

SEQ ID NO: 51 - RNA, 20 nt, synthetic construct
  source 1..20: mol_type = other RNA
aggaaggaggaggcctaagg

SEQ ID NO: 52 - RNA, 20 nt, synthetic construct
  source 1..20: mol_type = other RNA
aggaatctgcctaacaggag

SEQ ID NO: 53 - RNA, 20 nt, synthetic construct
  source 1..20: mol_type = other RNA
aggagactaggaaggaggag

SEQ ID NO: 54 - RNA, 20 nt, synthetic construct
  source 1..20: mol_type = other RNA
aggaggaggcctaaggatgg

SEQ ID NO: 55 - RNA, 20 nt, synthetic construct
  source 1..20: mol_type = other RNA
aggaggcctaaggatggggc

SEQ ID NO: 56 - RNA, 20 nt, synthetic construct
  source 1..20: mol_type = other RNA
aggaggtgggggttagaccc

SEQ ID NO: 57 - RNA, 20 nt, synthetic construct
  source 1..20: mol_type = other RNA
aggatggggcttttctgtca

SEQ ID NO: 58 - RNA, 20 nt, synthetic construct
  source 1..20: mol_type = other RNA
aggattggtgacagaaaagc

SEQ ID NO: 59 - RNA, 20 nt, synthetic construct
  source 1..20: mol_type = other RNA
aggcctaaggatggggcttt

SEQ ID NO: 60 - RNA, 20 nt, synthetic construct
  source 1..20: mol_type = other RNA
aggcctcctccttcctagtc

SEQ ID NO: 61 - RNA, 20 nt, synthetic construct
  source 1..20: mol_type = other RNA
agggacaggattggtgacag

SEQ ID NO: 62 - RNA, 20 nt, synthetic construct
  source 1..20: mol_type = other RNA
agggatcctgtgtccccgag

SEQ ID NO: 63 - RNA, 20 nt, synthetic construct
  source 1..20: mol_type = other RNA
agggccggttaatgtggctc

SEQ ID NO: 64 - RNA, 20 nt, synthetic construct
  source 1..20: mol_type = other RNA
aggggacagataaaagtacc

SEQ ID NO: 65 - RNA, 20 nt, synthetic construct
  source 1..20: mol_type = other RNA
aggtgggggttagacccaat

SEQ ID NO: 66 - RNA, 20 nt, synthetic construct
  source 1..20: mol_type = other RNA
aggtggtcccagctcgggga

SEQ ID NO: 67 - RNA, 20 nt, synthetic construct
  source 1..20: mol_type = other RNA
agtacccagaaccagagcca

SEQ ID NO: 68 - RNA, 20 nt, synthetic construct
  source 1..20: mol_type = other RNA
agtctcctgatattgggtct

SEQ ID NO: 69 - RNA, 20 nt, synthetic construct
  source 1..20: mol_type = other RNA
agtggccccactgtggggtg

SEQ ID NO: 70 - RNA, 20 nt, synthetic construct
  source 1..20: mol_type = other RNA
agtggggccactagggacag

SEQ ID NO: 71 - RNA, 20 nt, synthetic construct
  source 1..20: mol_type = other RNA
ataaaagtacccagaaccag

SEQ ID NO: 72 - RNA, 20 nt, synthetic construct
  source 1..20: mol_type = other RNA
ataaggaatctgcctaacag

SEQ ID NO: 73 - RNA, 20 nt, synthetic construct
  source 1..20: mol_type = other RNA
ataaggtggtcccagctcgg

SEQ ID NO: 74 - RNA, 20 nt, synthetic construct
  source 1..20: mol_type = other RNA
atataaggtggtcccagctc

SEQ ID NO: 75 - RNA, 20 nt, synthetic construct
  source 1..20: mol_type = other RNA
atatcaggagactaggaagg

SEQ ID NO: 76 - RNA, 20 nt, synthetic construct
  source 1..20: mol_type = other RNA
atattcccagggccggttaa

SEQ ID NO: 77 - RNA, 20 nt, synthetic construct
  source 1..20: mol_type = other RNA
atattgggtctaacccccac

SEQ ID NO: 78 - RNA, 20 nt, synthetic construct
  source 1..20: mol_type = other RNA
atcaggagactaggaaggag

SEQ ID NO: 79 - RNA, 20 nt, synthetic construct
  source 1..20: mol_type = other RNA
atcctgtccctagtggcccc

SEQ ID NO: 80 - RNA, 20 nt, synthetic construct
  source 1..20: mol_type = other RNA
atcctgtgtccccgagctgg

SEQ ID NO: 81 - RNA, 20 nt, synthetic construct
  source 1..20: mol_type = other RNA
atccttaggcctcctccttc

SEQ ID NO: 82 - RNA, 20 nt, synthetic construct
  source 1..20: mol_type = other RNA
atctgcctaacaggaggtgg

SEQ ID NO: 83 - RNA, 20 nt, synthetic construct
  source 1..20: mol_type = other RNA
atctgtcccctccaccccac

SEQ ID NO: 84 - RNA, 20 nt, synthetic construct
  source 1..20: mol_type = other RNA
atggggcttttctgtcacca

SEQ ID NO: 85 - RNA, 20 nt, synthetic construct
  source 1..20: mol_type = other RNA
atgtggctctggttctgggt

SEQ ID NO: 86 - RNA, 20 nt, synthetic construct
  source 1..20: mol_type = other RNA
attaaccggccctgggaata

SEQ ID NO: 87 - RNA, 20 nt, synthetic construct
  source 1..20: mol_type = other RNA
attcccagggccggttaatg

SEQ ID NO: 88 - RNA, 20 nt, synthetic construct
  source 1..20: mol_type = other RNA
attgggtctaacccccacct

SEQ ID NO: 89 - RNA, 20 nt, synthetic construct
  source 1..20: mol_type = other RNA
attggtgacagaaaagcccc

SEQ ID NO: 90 - RNA, 20 nt, synthetic construct
  source 1..20: mol_type = other RNA
caatatcaggagactaggaa

SEQ ID NO: 91 - RNA, 20 nt, synthetic construct
  source 1..20: mol_type = other RNA
caatcctgtccctagtggcc

SEQ ID NO: 92 - RNA, 20 nt, synthetic construct
  source 1..20: mol_type = other RNA
cacagtggggccactaggga

SEQ ID NO: 93 - RNA, 20 nt, synthetic construct
  source 1..20: mol_type = other RNA
cacattaaccggccctggga

SEQ ID NO: 94 - RNA, 20 nt, synthetic construct
  source 1..20: mol_type = other RNA
caccaatcctgtccctagtg

SEQ ID NO: 95 - RNA, 20 nt, synthetic construct
  source 1..20: mol_type = other RNA
caccccacagtggggccact

SEQ ID NO: 96 - RNA, 20 nt, synthetic construct
  source 1..20: mol_type = other RNA
cacctcctgttaggcagatt

SEQ ID NO: 97 - RNA, 20 nt, synthetic construct
  source 1..20: mol_type = other RNA
caccttatattcccagggcc

SEQ ID NO: 98 - RNA, 20 nt, synthetic construct
  source 1..20: mol_type = other RNA
cactagggacaggattggtg

SEQ ID NO: 99 - RNA, 20 nt, synthetic construct
  source 1..20: mol_type = other RNA
cactgtggggtggaggggac

SEQ ID NO: 100 - RNA, 20 nt, synthetic construct
  source 1..20: mol_type = other RNA
cagaaaagccccatccttag

SEQ ID NO: 101 - RNA, 20 nt, synthetic construct
  source 1..20: mol_type = other RNA
cagaaccagagccacattaa

SEQ ID NO: 102 - RNA, 20 nt, synthetic construct
  source 1..20: mol_type = other RNA
cagagccacattaaccggcc

SEQ ID NO: 103 - RNA, 20 nt, synthetic construct
  source 1..20: mol_type = other RNA
cagataaaagtacccagaac

SEQ ID NO: 104 - RNA, 20 nt, synthetic construct
  source 1..20: mol_type = other RNA
cagataaggaatctgcctaa

SEQ ID NO: 105 - RNA, 20 nt, synthetic construct
  source 1..20: mol_type = other RNA
cagctcggggacacaggatc

SEQ ID NO: 106 - RNA, 20 nt, synthetic construct
  source 1..20: mol_type = other RNA
caggagactaggaaggagga

SEQ ID NO: 107 - RNA, 20 nt, synthetic construct
  source 1..20: mol_type = other RNA
caggaggtgggggttagacc

SEQ ID NO: 108 - RNA, 20 nt, synthetic construct
  source 1..20: mol_type = other RNA
caggattggtgacagaaaag

SEQ ID NO: 109 - RNA, 20 nt, synthetic construct
  source 1..20: mol_type = other RNA
cagggatcctgtgtccccga

SEQ ID NO: 110 - RNA, 20 nt, synthetic construct
  source 1..20: mol_type = other RNA
cagggccggttaatgtggct

SEQ ID NO: 111 - RNA, 20 nt, synthetic construct
  source 1..20: mol_type = other RNA
cagtggggccactagggaca

SEQ ID NO: 112 - RNA, 20 nt, synthetic construct
  source 1..20: mol_type = other RNA
catccttaggcctcctcctt

SEQ ID NO: 113 - RNA, 20 nt, synthetic construct
  source 1..20: mol_type = other RNA
cattaaccggccctgggaat

SEQ ID NO: 114 - RNA, 20 nt, synthetic construct
  source 1..20: mol_type = other RNA
ccaatatcaggagactagga

SEQ ID NO: 115 - RNA, 20 nt, synthetic construct
  source 1..20: mol_type = other RNA
ccaatcctgtccctagtggc

SEQ ID NO: 116 - RNA, 20 nt, synthetic construct
  source 1..20: mol_type = other RNA
ccacagtggggccactaggg

SEQ ID NO: 117 - RNA, 20 nt, synthetic construct
  source 1..20: mol_type = other RNA
ccacattaaccggccctggg

SEQ ID NO: 118 - RNA, 20 nt, synthetic construct
  source 1..20: mol_type = other RNA
ccaccccacagtggggccac

SEQ ID NO: 119 - RNA, 20 nt, synthetic construct
  source 1..20: mol_type = other RNA
ccacctcctgttaggcagat

SEQ ID NO: 120 - RNA, 20 nt, synthetic construct
  source 1..20: mol_type = other RNA
ccaccttatattcccagggc

SEQ ID NO: 121 - RNA, 20 nt, synthetic construct
  source 1..20: mol_type = other RNA
ccactagggacaggattggt

SEQ ID NO: 122 - RNA, 20 nt, synthetic construct
  source 1..20: mol_type = other RNA
ccactgtggggtggagggga

SEQ ID NO: 123 - RNA, 20 nt, synthetic construct
  source 1..20: mol_type = other RNA
ccagaaccagagccacatta

SEQ ID NO: 124 - RNA, 20 nt, synthetic construct
  source 1..20: mol_type = other RNA
ccagagccacattaaccggc

SEQ ID NO: 125 - RNA, 20 nt, synthetic construct
  source 1..20: mol_type = other RNA
ccagctcggggacacaggat

SEQ ID NO: 126 - RNA, 20 nt, synthetic construct
  source 1..20: mol_type = other RNA
ccagggatcctgtgtccccg

SEQ ID NO: 127 - RNA, 20 nt, synthetic construct
  source 1..20: mol_type = other RNA
ccagggccggttaatgtggc

SEQ ID NO: 128 - RNA, 20 nt, synthetic construct
  source 1..20: mol_type = other RNA
ccatccttaggcctcctcct

SEQ ID NO: 129 - RNA, 20 nt, synthetic construct
  source 1..20: mol_type = other RNA
cccaatatcaggagactagg

SEQ ID NO: 130 - RNA, 20 nt, synthetic construct
  source 1..20: mol_type = other RNA
cccacagtggggccactagg

SEQ ID NO: 131 - RNA, 20 nt, synthetic construct
  source 1..20: mol_type = other RNA
cccacctcctgttaggcaga

SEQ ID NO: 132 - RNA, 20 nt, synthetic construct
  source 1..20: mol_type = other RNA
cccactgtggggtggagggg

SEQ ID NO: 133 - RNA, 20 nt, synthetic construct
  source 1..20: mol_type = other RNA
cccagaaccagagccacatt

SEQ ID NO: 134 - RNA, 20 nt, synthetic construct
  source 1..20: mol_type = other RNA
cccagctcggggacacagga

SEQ ID NO: 135 - RNA, 20 nt, synthetic construct
  source 1..20: mol_type = other RNA
cccagggccggttaatgtgg

SEQ ID NO: 136 - RNA, 20 nt, synthetic construct
  source 1..20: mol_type = other RNA
cccatccttaggcctcctcc

SEQ ID NO: 137 - RNA, 20 nt, synthetic construct
  source 1..20: mol_type = other RNA
ccccacagtggggccactag

SEQ ID NO: 138 - RNA, 20 nt, synthetic construct
  source 1..20: mol_type = other RNA
ccccacctcctgttaggcag

SEQ ID NO: 139 - RNA, 20 nt, synthetic construct
  source 1..20: mol_type = other RNA
ccccactgtggggtggaggg

SEQ ID NO: 140 - RNA, 20 nt, synthetic construct
  source 1..20: mol_type = other RNA
ccccatccttaggcctcctc

SEQ ID NO: 141 - RNA, 20 nt, synthetic construct
  source 1..20: mol_type = other RNA
cccccacctcctgttaggca

SEQ ID NO: 142 - RNA, 20 nt, synthetic construct
  source 1..20: mol_type = other RNA
ccccgagctgggaccacctt

SEQ ID NO: 143 - RNA, 20 nt, synthetic construct
  source 1..20: mol_type = other RNA
cccctccaccccacagtggg

SEQ ID NO: 144 - RNA, 20 nt, synthetic construct
  source 1..20: mol_type = other RNA
cccgagctgggaccacctta

SEQ ID NO: 145 - RNA, 20 nt, synthetic construct
  source 1..20: mol_type = other RNA
ccctagtggccccactgtgg

SEQ ID NO: 146 - RNA, 20 nt, synthetic construct
  source 1..20: mol_type = other RNA
ccctccaccccacagtgggg

SEQ ID NO: 147 - RNA, 20 nt, synthetic construct
  source 1..20: mol_type = other RNA
ccctgggaatataaggtggt

SEQ ID NO: 148 - RNA, 20 nt, synthetic construct
  source 1..20: mol_type = other RNA
ccgagctgggaccaccttat

SEQ ID NO: 149 - RNA, 20 nt, synthetic construct
  source 1..20: mol_type = other RNA
ccggccctgggaatataagg

SEQ ID NO: 150 - RNA, 20 nt, synthetic construct
  source 1..20: mol_type = other RNA
ccggttaatgtggctctggt

SEQ ID NO: 151 - RNA, 20 nt, synthetic construct
  source 1..20: mol_type = other RNA
cctaacaggaggtgggggtt

SEQ ID NO: 152 - RNA, 20 nt, synthetic construct
  source 1..20: mol_type = other RNA
cctaaggatggggcttttct

SEQ ID NO: 153 - RNA, 20 nt, synthetic construct
  source 1..20: mol_type = other RNA
cctagtctcctgatattggg

SEQ ID NO: 154 - RNA, 20 nt, synthetic construct
  source 1..20: mol_type = other RNA
cctagtggccccactgtggg

SEQ ID NO: 155 - RNA, 20 nt, synthetic construct
  source 1..20: mol_type = other RNA
cctccaccccacagtggggc

SEQ ID NO: 156 - RNA, 20 nt, synthetic construct
  source 1..20: mol_type = other RNA
cctccagggatcctgtgtcc

SEQ ID NO: 157 - RNA, 20 nt, synthetic construct
  source 1..20: mol_type = other RNA
cctcctccttcctagtctcc

SEQ ID NO: 158 - RNA, 20 nt, synthetic construct
  source 1..20: mol_type = other RNA
cctccttcctagtctcctga

SEQ ID NO: 159 - RNA, 20 nt, synthetic construct
  source 1..20: mol_type = other RNA
cctgatattgggtctaaccc

SEQ ID NO: 160 - RNA, 20 nt, synthetic construct
  source 1..20: mol_type = other RNA
cctgggaatataaggtggtc

SEQ ID NO: 161 - RNA, 20 nt, synthetic construct
  source 1..20: mol_type = other RNA
cctgtccctagtggccccac

SEQ ID NO: 162 - RNA, 20 nt, synthetic construct
  source 1..20: mol_type = other RNA
cctgtgtccccgagctggga

SEQ ID NO: 163 - RNA, 20 nt, synthetic construct
  source 1..20: mol_type = other RNA
ccttaggcctcctccttcct

SEQ ID NO: 164 - RNA, 20 nt, synthetic construct
  source 1..20: mol_type = other RNA
ccttatattcccagggccgg

SEQ ID NO: 165 - RNA, 20 nt, synthetic construct
  source 1..20: mol_type = other RNA
ccttcctagtctcctgatat

SEQ ID NO: 166 - RNA, 20 nt, synthetic construct
  source 1..20: mol_type = other RNA
cgagctgggaccaccttata

SEQ ID NO: 167 - RNA, 20 nt, synthetic construct
  source 1..20: mol_type = other RNA
cggccctgggaatataaggt

SEQ ID NO: 168 - RNA, 20 nt, synthetic construct
  source 1..20: mol_type = other RNA
cggttaatgtggctctggtt

SEQ ID NO: 169 - RNA, 20 nt, synthetic construct
  source 1..20: mol_type = other RNA
ctaacaggaggtgggggtta

SEQ ID NO: 170 - RNA, 20 nt, synthetic construct
  source 1..20: mol_type = other RNA
ctaacccccacctcctgtta

SEQ ID NO: 171 - RNA, 20 nt, synthetic construct
  source 1..20: mol_type = other RNA
ctaaggatggggcttttctg

SEQ ID NO: 172 - RNA, 20 nt, synthetic construct
  source 1..20: mol_type = other RNA
ctaggaaggaggaggcctaa

SEQ ID NO: 173 - RNA, 20 nt, synthetic construct
  source 1..20: mol_type = other RNA
ctagggacaggattggtgac

SEQ ID NO: 174 - RNA, 20 nt, synthetic construct
  source 1..20: mol_type = other RNA
ctagtctcctgatattgggt

SEQ ID NO: 175 - RNA, 20 nt, synthetic construct
  source 1..20: mol_type = other RNA
ctagtggccccactgtgggg

SEQ ID NO: 176 - RNA, 20 nt, synthetic construct
  source 1..20: mol_type = other RNA
ctccaccccacagtggggcc

SEQ ID NO: 177 - RNA, 20 nt, synthetic construct
  source 1..20: mol_type = other RNA
ctccagggatcctgtgtccc

SEQ ID NO: 178 - RNA, 20 nt, synthetic construct
  source 1..20: mol_type = other RNA
ctcctccttcctagtctcct

SEQ ID NO: 179 - RNA, 20 nt, synthetic construct
  source 1..20: mol_type = other RNA
ctcctgatattgggtctaac

SEQ ID NO: 180 - RNA, 20 nt, synthetic construct
  source 1..20: mol_type = other RNA
ctccttcctagtctcctgat

SEQ ID NO: 181 - RNA, 20 nt, synthetic construct
  source 1..20: mol_type = other RNA
ctcggggacacaggatccct

SEQ ID NO: 182 - RNA, 20 nt, synthetic construct
  source 1..20: mol_type = other RNA
ctctggttctgggtactttt

SEQ ID NO: 183 - RNA, 20 nt, synthetic construct
  source 1..20: mol_type = other RNA
ctgatattgggtctaacccc

SEQ ID NO: 184 - RNA, 20 nt, synthetic construct
  source 1..20: mol_type = other RNA
ctgcctaacaggaggtgggg

SEQ ID NO: 185 - RNA, 20 nt, synthetic construct
  source 1..20: mol_type = other RNA
ctgcctccagggatcctgtg

SEQ ID NO: 186 - RNA, 20 nt, synthetic construct
  source 1..20: mol_type = other RNA
ctgggaatataaggtggtcc

SEQ ID NO: 187 - RNA, 20 nt, synthetic construct
  source 1..20: mol_type = other RNA
ctgggaccaccttatattcc

SEQ ID NO: 188 - RNA, 20 nt, synthetic construct
  source 1..20: mol_type = other RNA
ctgggtacttttatctgtcc

SEQ ID NO: 189 - RNA, 20 nt, synthetic construct
  source 1..20: mol_type = other RNA
ctggttctgggtacttttat

SEQ ID NO: 190 - RNA, 20 nt, synthetic construct
  source 1..20: mol_type = other RNA
ctgtcaccaatcctgtccct

SEQ ID NO: 191 - RNA, 20 nt, synthetic construct
  source 1..20: mol_type = other RNA
ctgtcccctccaccccacag

SEQ ID NO: 192 - RNA, 20 nt, synthetic construct
  source 1..20: mol_type = other RNA
ctgtccctagtggccccact

SEQ ID NO: 193 - RNA, 20 nt, synthetic construct
  source 1..20: mol_type = other RNA
ctgtggggtggaggggacag

SEQ ID NO: 194 - RNA, 20 nt, synthetic construct
  source 1..20: mol_type = other RNA
ctgtgtccccgagctgggac

SEQ ID NO: 195 - RNA, 20 nt, synthetic construct
  source 1..20: mol_type = other RNA
cttaggcctcctccttccta

SEQ ID NO: 196 - RNA, 20 nt, synthetic construct
  source 1..20: mol_type = other RNA
cttatattcccagggccggt

SEQ ID NO: 197 - RNA, 20 nt, synthetic construct
  source 1..20: mol_type = other RNA
cttcctagtctcctgatatt

SEQ ID NO: 198 - RNA, 20 nt, synthetic construct
  source 1..20: mol_type = other RNA
cttttatctgtcccctccac

SEQ ID NO: 199 - RNA, 20 nt, synthetic construct
  source 1..20: mol_type = other RNA
cttttctgtcaccaatcctg

SEQ ID NO: 200 - RNA, 20 nt, synthetic construct
  source 1..20: mol_type = other RNA
gaaaagccccatccttaggc

SEQ ID NO: 201 - RNA, 20 nt, synthetic construct
  source 1..20: mol_type = other RNA
gaaccagagccacattaacc

SEQ ID NO: 202 - RNA, 20 nt, synthetic construct
  source 1..20: mol_type = other RNA
gaaggaggaggcctaaggat

SEQ ID NO: 203 - RNA, 20 nt, synthetic construct
  source 1..20: mol_type = other RNA
gaatataaggtggtcccagc

SEQ ID NO: 204 - RNA, 20 nt, synthetic construct
  source 1..20: mol_type = other RNA
gaatctgcctaacaggaggt

SEQ ID NO: 205 - RNA, 20 nt, synthetic construct
  source 1..20: mol_type = other RNA
gacagaaaagccccatcctt

SEQ ID NO: 206 - RNA, 20 nt, synthetic construct
  source 1..20: mol_type = other RNA
gacagataaaagtacccaga

SEQ ID NO: 207 - RNA, 20 nt, synthetic construct
  source 1..20: mol_type = other RNA
gacaggattggtgacagaaa

SEQ ID NO: 208 - RNA, 20 nt, synthetic construct
  source 1..20: mol_type = other RNA
gaccaccttatattcccagg

SEQ ID NO: 209 - RNA, 20 nt, synthetic construct
  source 1..20: mol_type = other RNA
gacccaatatcaggagacta

SEQ ID NO: 210 - RNA, 20 nt, synthetic construct
  source 1..20: mol_type = other RNA
gactaggaaggaggaggcct

SEQ ID NO: 211 - RNA, 20 nt, synthetic construct
  source 1..20: mol_type = other RNA
gagactaggaaggaggaggc

SEQ ID NO: 212 - RNA, 20 nt, synthetic construct
  source 1..20: mol_type = other RNA
gagccacattaaccggccct

SEQ ID NO: 213 - RNA, 20 nt, synthetic construct
  source 1..20: mol_type = other RNA
gagctgggaccaccttatat

SEQ ID NO: 214 - RNA, 20 nt, synthetic construct
  source 1..20: mol_type = other RNA
gaggaggcctaaggatgggg

SEQ ID NO: 215 - RNA, 20 nt, synthetic construct
  source 1..20: mol_type = other RNA
gaggcctaaggatggggctt

SEQ ID NO: 216 - RNA, 20 nt, synthetic construct
  source 1..20: mol_type = other RNA
gaggggacagataaaagtac

SEQ ID NO: 217 - RNA, 20 nt, synthetic construct
  source 1..20: mol_type = other RNA
gaggtgggggttagacccaa

SEQ ID NO: 218 - RNA, 20 nt, synthetic construct
  source 1..20: mol_type = other RNA
gataaaagtacccagaacca

SEQ ID NO: 219 - RNA, 20 nt, synthetic construct
  source 1..20: mol_type = other RNA
gataaggaatctgcctaaca

SEQ ID NO: 220 - RNA, 20 nt, synthetic construct
  source 1..20: mol_type = other RNA
gatattgggtctaaccccca

SEQ ID NO: 221 - RNA, 20 nt, synthetic construct
  source 1..20: mol_type = other RNA
gatcctgtgtccccgagctg

SEQ ID NO: 222 - RNA, 20 nt, synthetic construct
  source 1..20: mol_type = other RNA
gatggggcttttctgtcacc

SEQ ID NO: 223 - RNA, 20 nt, synthetic construct
  source 1..20: mol_type = other RNA
gattggtgacagaaaagccc

SEQ ID NO: 224 - RNA, 20 nt, synthetic construct
  source 1..20: mol_type = other RNA
gccacattaaccggccctgg

SEQ ID NO: 225 - RNA, 20 nt, synthetic construct
  source 1..20: mol_type = other RNA
gccactagggacaggattgg

SEQ ID NO: 226 - RNA, 20 nt, synthetic construct
  source 1..20: mol_type = other RNA
gccccactgtggggtggagg

SEQ ID NO: 227 - RNA, 20 nt, synthetic construct
  source 1..20: mol_type = other RNA
gccccatccttaggcctcct

SEQ ID NO: 228 - RNA, 20 nt, synthetic construct
  source 1..20: mol_type = other RNA
gccctgggaatataaggtgg

SEQ ID NO: 229 - RNA, 20 nt, synthetic construct
  source 1..20: mol_type = other RNA
gccggttaatgtggctctgg

SEQ ID NO: 230 - RNA, 20 nt, synthetic construct
  source 1..20: mol_type = other RNA
gcctaacaggaggtgggggt

SEQ ID NO: 231 - RNA, 20 nt, synthetic construct
  source 1..20: mol_type = other RNA
gcctaaggatggggcttttc

SEQ ID NO: 232 - RNA, 20 nt, synthetic construct
  source 1..20: mol_type = other RNA
gcctccagggatcctgtgtc

SEQ ID NO: 233 - RNA, 20 nt, synthetic construct
  source 1..20: mol_type = other RNA
gcctcctccttcctagtctc

SEQ ID NO: 234 - RNA, 20 nt, synthetic construct
  source 1..20: mol_type = other RNA
gctcggggacacaggatccc

SEQ ID NO: 235 - RNA, 20 nt, synthetic construct
  source 1..20: mol_type = other RNA
gctctggttctgggtacttt

SEQ ID NO: 236 - RNA, 20 nt, synthetic construct
  source 1..20: mol_type = other RNA
gctgggaccaccttatattc

SEQ ID NO: 237 - RNA, 20 nt, synthetic construct
  source 1..20: mol_type = other RNA
gcttttctgtcaccaatcct

SEQ ID NO: 238 - RNA, 20 nt, synthetic construct
  source 1..20: mol_type = other RNA
ggaaggaggaggcctaagga

SEQ ID NO: 239 - RNA, 20 nt, synthetic construct
  source 1..20: mol_type = other RNA
ggaatataaggtggtcccag

SEQ ID NO: 240 - RNA, 20 nt, synthetic construct
  source 1..20: mol_type = other RNA
ggaatctgcctaacaggagg

SEQ ID NO: 241 - RNA, 20 nt, synthetic construct
  source 1..20: mol_type = other RNA
ggacagataaaagtacccag

SEQ ID NO: 242 - RNA, 20 nt, synthetic construct
  source 1..20: mol_type = other RNA
ggacaggattggtgacagaa

SEQ ID NO: 243 - RNA, 20 nt, synthetic construct
  source 1..20: mol_type = other RNA
ggaccaccttatattcccag

SEQ ID NO: 244 - RNA, 20 nt, synthetic construct
  source 1..20: mol_type = other RNA
ggagactaggaaggaggagg

SEQ ID NO: 245 - RNA, 20 nt, synthetic construct
  source 1..20: mol_type = other RNA
ggaggaggcctaaggatggg

SEQ ID NO: 246 - RNA, 20 nt, synthetic construct
  source 1..20: mol_type = other RNA
ggaggcctaaggatggggct

SEQ ID NO: 247 - RNA, 20 nt, synthetic construct
  source 1..20: mol_type = other RNA
ggaggggacagataaaagta

SEQ ID NO: 248 - RNA, 20 nt, synthetic construct
  source 1..20: mol_type = other RNA
ggaggtgggggttagaccca

SEQ ID NO: 249 - RNA, 20 nt, synthetic construct
  source 1..20: mol_type = other RNA
ggatcctgtgtccccgagct

SEQ ID NO: 250 - RNA, 20 nt, synthetic construct
  source 1..20: mol_type = other RNA
ggatggggcttttctgtcac

SEQ ID NO: 251 - RNA, 20 nt, synthetic construct
  source 1..20: mol_type = other RNA
ggattggtgacagaaaagcc

SEQ ID NO: 252 - RNA, 20 nt, synthetic construct
  source 1..20: mol_type = other RNA
ggccactagggacaggattg

SEQ ID NO: 253 - RNA, 20 nt, synthetic construct
  source 1..20: mol_type = other RNA
ggccccactgtggggtggag

SEQ ID NO: 254 - RNA, 20 nt, synthetic construct
  source 1..20: mol_type = other RNA
ggccctgggaatataaggtg

SEQ ID NO: 255 - RNA, 20 nt, synthetic construct
  source 1..20: mol_type = other RNA
ggccggttaatgtggctctg

SEQ ID NO: 256 - RNA, 20 nt, synthetic construct
  source 1..20: mol_type = other RNA
ggcctaaggatggggctttt

SEQ ID NO: 257 - RNA, 20 nt, synthetic construct
  source 1..20: mol_type = other RNA
ggcctcctccttcctagtct

SEQ ID NO: 258 - RNA, 20 nt, synthetic construct
  source 1..20: mol_type = other RNA
ggctctggttctgggtactt

SEQ ID NO: 259 - RNA, 20 nt, synthetic construct
  source 1..20: mol_type = other RNA
ggcttttctgtcaccaatcc

SEQ ID NO: 260 - RNA, 20 nt, synthetic construct
  source 1..20: mol_type = other RNA
gggaatataaggtggtccca

SEQ ID NO: 261 - RNA, 20 nt, synthetic construct
  source 1..20: mol_type = other RNA
gggacagataaaagtaccca

SEQ ID NO: 262 - RNA, 20 nt, synthetic construct
  source 1..20: mol_type = other RNA
gggacaggattggtgacaga

SEQ ID NO: 263 - RNA, 20 nt, synthetic construct
  source 1..20: mol_type = other RNA
gggaccaccttatattccca

SEQ ID NO: 264 - RNA, 20 nt, synthetic construct
  source 1..20: mol_type = other RNA
gggatcctgtgtccccgagc

SEQ ID NO: 265 - RNA, 20 nt, synthetic construct
  source 1..20: mol_type = other RNA
gggccactagggacaggatt

SEQ ID NO: 266 - RNA, 20 nt, synthetic construct
  source 1..20: mol_type = other RNA
gggccggttaatgtggctct

SEQ ID NO: 267 - RNA, 20 nt, synthetic construct
  source 1..20: mol_type = other RNA
gggcttttctgtcaccaatc

SEQ ID NO: 268 - RNA, 20 nt, synthetic construct
  source 1..20: mol_type = other RNA
ggggacagataaaagtaccc

SEQ ID NO: 269 - RNA, 20 nt, synthetic construct
  source 1..20: mol_type = other RNA
ggggccactagggacaggat

SEQ ID NO: 270 - RNA, 20 nt, synthetic construct
  source 1..20: mol_type = other RNA
ggggcttttctgtcaccaat

SEQ ID NO: 271 - RNA, 20 nt, synthetic construct
  source 1..20: mol_type = other RNA
gggggttagacccaatatca

SEQ ID NO: 272 - RNA, 20 nt, synthetic construct
  source 1..20: mol_type = other RNA
ggggtggaggggacagataa

SEQ ID NO: 273 - RNA, 20 nt, synthetic construct
  source 1..20: mol_type = other RNA
ggggttagacccaatatcag

SEQ ID NO: 274 - RNA, 20 nt, synthetic construct
  source 1..20: mol_type = other RNA
gggtacttttatctgtcccc

SEQ ID NO: 275 - RNA, 20 nt, synthetic construct
  source 1..20: mol_type = other RNA
gggtctaacccccacctcct

SEQ ID NO: 276 - RNA, 20 nt, synthetic construct
  source 1..20: mol_type = other RNA
gggtggaggggacagataaa

SEQ ID NO: 277 - RNA, 20 nt, synthetic construct
  source 1..20: mol_type = other RNA
gggttagacccaatatcagg

SEQ ID NO: 278 - RNA, 20 nt, synthetic construct
  source 1..20: mol_type = other RNA
ggtacttttatctgtcccct

SEQ ID NO: 279 - RNA, 20 nt, synthetic construct
  source 1..20: mol_type = other RNA
ggtcccagctcggggacaca

SEQ ID NO: 280 - RNA, 20 nt, synthetic construct
  source 1..20: mol_type = other RNA
ggtctaacccccacctcctg

SEQ ID NO: 281 - RNA, 20 nt, synthetic construct
  source 1..20: mol_type = other RNA
ggtgacagaaaagccccatc

SEQ ID NO: 282 - RNA, 20 nt, synthetic construct
  source 1..20: mol_type = other RNA
ggtggaggggacagataaaa

SEQ ID NO: 283 - RNA, 20 nt, synthetic construct
  source 1..20: mol_type = other RNA
ggtgggggttagacccaata

SEQ ID NO: 284 - RNA, 20 nt, synthetic construct
  source 1..20: mol_type = other RNA
ggtggtcccagctcggggac

SEQ ID NO: 285 - RNA, 20 nt, synthetic construct
  source 1..20: mol_type = other RNA
ggttaatgtggctctggttc

SEQ ID NO: 286 - RNA, 20 nt, synthetic construct
  source 1..20: mol_type = other RNA
ggttagacccaatatcagga

SEQ ID NO: 287 - RNA, 20 nt, synthetic construct
  source 1..20: mol_type = other RNA
ggttctgggtacttttatct

SEQ ID NO: 288 - RNA, 20 nt, synthetic construct
  source 1..20: mol_type = other RNA
gtacccagaaccagagccac

SEQ ID NO: 289 - RNA, 20 nt, synthetic construct
  source 1..20: mol_type = other RNA
gtacttttatctgtcccctc

SEQ ID NO: 290 - RNA, 20 nt, synthetic construct
  source 1..20: mol_type = other RNA
gtcaccaatcctgtccctag

SEQ ID NO: 291 - RNA, 20 nt, synthetic construct
  source 1..20: mol_type = other RNA
gtcccagctcggggacacag

SEQ ID NO: 292 - RNA, 20 nt, synthetic construct
  source 1..20: mol_type = other RNA
gtccccgagctgggaccacc

SEQ ID NO: 293 - RNA, 20 nt, synthetic construct
  source 1..20: mol_type = other RNA
gtcccctccaccccacagtg

SEQ ID NO: 294 - RNA, 20 nt, synthetic construct
  source 1..20: mol_type = other RNA
gtccctagtggccccactgt

SEQ ID NO: 295 - RNA, 20 nt, synthetic construct
  source 1..20: mol_type = other RNA
gtctaacccccacctcctgt

SEQ ID NO: 296 - RNA, 20 nt, synthetic construct
  source 1..20: mol_type = other RNA
gtctcctgatattgggtcta

SEQ ID NO: 297 - RNA, 20 nt, synthetic construct
  source 1..20: mol_type = other RNA
gtgacagaaaagccccatcc

SEQ ID NO: 298 - RNA, 20 nt, synthetic construct
  source 1..20: mol_type = other RNA
gtggaggggacagataaaag

SEQ ID NO: 299 - RNA, 20 nt, synthetic construct
  source 1..20: mol_type = other RNA
gtggccccactgtggggtgg

SEQ ID NO: 300 - RNA, 20 nt, synthetic construct
  source 1..20: mol_type = other RNA
gtggctctggttctgggtac

SEQ ID NO: 301 - RNA, 20 nt, synthetic construct
  source 1..20: mol_type = other RNA
gtggggccactagggacagg

SEQ ID NO: 302 - RNA, 20 nt, synthetic construct
  source 1..20: mol_type = other RNA
gtgggggttagacccaatat

SEQ ID NO: 303 - RNA, 20 nt, synthetic construct
  source 1..20: mol_type = other RNA
gtggggtggaggggacagat

SEQ ID NO: 304 - RNA, 20 nt, synthetic construct
  source 1..20: mol_type = other RNA
gtggtcccagctcggggaca

SEQ ID NO: 305 - RNA, 20 nt, synthetic construct
  source 1..20: mol_type = other RNA
gtgtccccgagctgggacca

SEQ ID NO: 306 - RNA, 20 nt, synthetic construct
  source 1..20: mol_type = other RNA
gttaatgtggctctggttct

SEQ ID NO: 307 - RNA, 20 nt, synthetic construct
  source 1..20: mol_type = other RNA
gttagacccaatatcaggag

SEQ ID NO: 308 - RNA, 20 nt, synthetic construct
  source 1..20: mol_type = other RNA
gttctgggtacttttatctg

SEQ ID NO: 309 - RNA, 20 nt, synthetic construct
  source 1..20: mol_type = other RNA
taaaagtacccagaaccaga

SEQ ID NO: 310 - RNA, 20 nt, synthetic construct
  source 1..20: mol_type = other RNA
taacaggaggtgggggttag

SEQ ID NO: 311 - RNA, 20 nt, synthetic construct
  source 1..20: mol_type = other RNA
taacccccacctcctgttag

SEQ ID NO: 312 - RNA, 20 nt, synthetic construct
  source 1..20: mol_type = other RNA
taaccggccctgggaatata

SEQ ID NO: 313 - RNA, 20 nt, synthetic construct
  source 1..20: mol_type = other RNA
taaggaatctgcctaacagg

SEQ ID NO: 314 - RNA, 20 nt, synthetic construct
  source 1..20: mol_type = other RNA
taaggatggggcttttctgt

SEQ ID NO: 315 - RNA, 20 nt, synthetic construct
  source 1..20: mol_type = other RNA
taaggtggtcccagctcggg

SEQ ID NO: 316 - RNA, 20 nt, synthetic construct
  source 1..20: mol_type = other RNA
taatgtggctctggttctgg

SEQ ID NO: 317 - RNA, 20 nt, synthetic construct
  source 1..20: mol_type = other RNA
tacccagaaccagagccaca

SEQ ID NO: 318 - RNA, 20 nt, synthetic construct
  source 1..20: mol_type = other RNA
tacttttatctgtcccctcc

SEQ ID NO: 319 - RNA, 20 nt, synthetic construct
  source 1..20: mol_type = other RNA
tagacccaatatcaggagac

SEQ ID NO: 320 - RNA, 20 nt, synthetic construct
  source 1..20: mol_type = other RNA
taggaaggaggaggcctaag

SEQ ID NO: 321 - RNA, 20 nt, synthetic construct
  source 1..20: mol_type = other RNA
taggcctcctccttcctagt

SEQ ID NO: 322 - RNA, 20 nt, synthetic construct
  source 1..20: mol_type = other RNA
tagggacaggattggtgaca

SEQ ID NO: 323 - RNA, 20 nt, synthetic construct
  source 1..20: mol_type = other RNA
tagtctcctgatattgggtc

SEQ ID NO: 324 - RNA, 20 nt, synthetic construct
  source 1..20: mol_type = other RNA
tagtggccccactgtggggt

SEQ ID NO: 325 - RNA, 20 nt, synthetic construct
  source 1..20: mol_type = other RNA
tataaggtggtcccagctcg

SEQ ID NO: 326 - RNA, 20 nt, synthetic construct
  source 1..20: mol_type = other RNA
tatattcccagggccggtta

SEQ ID NO: 327 - RNA, 20 nt, synthetic construct
  source 1..20: mol_type = other RNA
tatcaggagactaggaagga

SEQ ID NO: 328 - RNA, 20 nt, synthetic construct
  source 1..20: mol_type = other RNA
tatctgtcccctccacccca

SEQ ID NO: 329 - RNA, 20 nt, synthetic construct
  source 1..20: mol_type = other RNA
tattcccagggccggttaat

SEQ ID NO: 330 - RNA, 20 nt, synthetic construct
  source 1..20: mol_type = other RNA
tattgggtctaacccccacc

SEQ ID NO: 331 - RNA, 20 nt, synthetic construct
  source 1..20: mol_type = other RNA
tcaccaatcctgtccctagt

SEQ ID NO: 332 - RNA, 20 nt, synthetic construct
  source 1..20: mol_type = other RNA
tcaggagactaggaaggagg

SEQ ID NO: 333 - RNA, 20 nt, synthetic construct
  source 1..20: mol_type = other RNA
tccaccccacagtggggcca

SEQ ID NO: 334 - RNA, 20 nt, synthetic construct
  source 1..20: mol_type = other RNA
tccagggatcctgtgtcccc

SEQ ID NO: 335 - RNA, 20 nt, synthetic construct
  source 1..20: mol_type = other RNA
tcccagctcggggacacagg

SEQ ID NO: 336 - RNA, 20 nt, synthetic construct
  source 1..20: mol_type = other RNA
tcccagggccggttaatgtg

SEQ ID NO: 337 - RNA, 20 nt, synthetic construct
  source 1..20: mol_type = other RNA
tccccgagctgggaccacct

SEQ ID NO: 338 - RNA, 20 nt, synthetic construct
  source 1..20: mol_type = other RNA
tcccctccaccccacagtgg

SEQ ID NO: 339 - RNA, 20 nt, synthetic construct
  source 1..20: mol_type = other RNA
tccctagtggccccactgtg

SEQ ID NO: 340 - RNA, 20 nt, synthetic construct
  source 1..20: mol_type = other RNA
tcctagtctcctgatattgg

SEQ ID NO: 341 - RNA, 20 nt, synthetic construct
  source 1..20: mol_type = other RNA
tcctccttcctagtctcctg

SEQ ID NO: 342 - RNA, 20 nt, synthetic construct
  source 1..20: mol_type = other RNA
tcctgatattgggtctaacc

SEQ ID NO: 343 - RNA, 20 nt, synthetic construct
  source 1..20: mol_type = other RNA
tcctgtccctagtggcccca

SEQ ID NO: 344 - RNA, 20 nt, synthetic construct
  source 1..20: mol_type = other RNA
tcctgtgtccccgagctggg

SEQ ID NO: 345 - RNA, 20 nt, synthetic construct
  source 1..20: mol_type = other RNA
tccttaggcctcctccttcc

SEQ ID NO: 346 - RNA, 20 nt, synthetic construct
  source 1..20: mol_type = other RNA
tccttcctagtctcctgata

SEQ ID NO: 347 - RNA, 20 nt, synthetic construct
  source 1..20: mol_type = other RNA
tctaacccccacctcctgtt

SEQ ID NO: 348 - RNA, 20 nt, synthetic construct
  source 1..20: mol_type = other RNA
tctcctgatattgggtctaa

SEQ ID NO: 349 - RNA, 20 nt, synthetic construct
  source 1..20: mol_type = other RNA
tctgcctaacaggaggtggg

SEQ ID NO: 350 - RNA, 20 nt, synthetic construct
  source 1..20: mol_type = other RNA
tctgggtacttttatctgtc

SEQ ID NO: 351 - RNA, 20 nt, synthetic construct
  source 1..20: mol_type = other RNA
tctggttctgggtactttta

SEQ ID NO: 352 - RNA, 20 nt, synthetic construct
  source 1..20: mol_type = other RNA
tctgtcaccaatcctgtccc

SEQ ID NO: 353 - RNA, 20 nt, synthetic construct
  source 1..20: mol_type = other RNA
tctgtcccctccaccccaca

SEQ ID NO: 354 - RNA, 20 nt, synthetic construct
  source 1..20: mol_type = other RNA
tgacagaaaagccccatcct

SEQ ID NO: 355 - RNA, 20 nt, synthetic construct
  source 1..20: mol_type = other RNA
tgatattgggtctaaccccc

SEQ ID NO: 356 - RNA, 20 nt, synthetic construct
  source 1..20: mol_type = other RNA
tgcctaacaggaggtggggg

SEQ ID NO: 357 - RNA, 20 nt, synthetic construct
  source 1..20: mol_type = other RNA
tgcctccagggatcctgtgt

SEQ ID NO: 358 - RNA, 20 nt, synthetic construct
  source 1..20: mol_type = other RNA
tggaggggacagataaaagt

SEQ ID NO: 359 - RNA, 20 nt, synthetic construct
  source 1..20: mol_type = other RNA
tggccccactgtggggtgga

SEQ ID NO: 360 - RNA, 20 nt, synthetic construct
  source 1..20: mol_type = other RNA
tggctctggttctgggtact

SEQ ID NO: 361 - RNA, 20 nt, synthetic construct
  source 1..20: mol_type = other RNA
tgggaatataaggtggtccc

SEQ ID NO: 362 - RNA, 20 nt, synthetic construct
  source 1..20: mol_type = other RNA
tgggaccaccttatattccc

SEQ ID NO: 363 - RNA, 20 nt, synthetic construct
  source 1..20: mol_type = other RNA
tggggccactagggacagga

SEQ ID NO: 364 - RNA, 20 nt, synthetic construct
  source 1..20: mol_type = other RNA
tggggcttttctgtcaccaa

SEQ ID NO: 365 - RNA, 20 nt, synthetic construct
  source 1..20: mol_type = other RNA
tgggggttagacccaatatc

SEQ ID NO: 366 - RNA, 20 nt, synthetic construct
  source 1..20: mol_type = other RNA
tggggtggaggggacagata

SEQ ID NO: 367 - RNA, 20 nt, synthetic construct
  source 1..20: mol_type = other RNA
tgggtacttttatctgtccc

SEQ ID NO: 368 - RNA, 20 nt, synthetic construct
  source 1..20: mol_type = other RNA
tgggtctaacccccacctcc

SEQ ID NO: 369 - RNA, 20 nt, synthetic construct
  source 1..20: mol_type = other RNA
tggtcccagctcggggacac

SEQ ID NO: 370 - RNA, 20 nt, synthetic construct
  source 1..20: mol_type = other RNA
tggtgacagaaaagccccat

SEQ ID NO: 371 - RNA, 20 nt, synthetic construct
  source 1..20: mol_type = other RNA
tggttctgggtacttttatc

SEQ ID NO: 372 - RNA, 20 nt, synthetic construct
  source 1..20: mol_type = other RNA
tgtcaccaatcctgtcccta

SEQ ID NO: 373 - RNA, 20 nt, synthetic construct
  source 1..20: mol_type = other RNA
tgtccccgagctgggaccac

SEQ ID NO: 374 - RNA, 20 nt, synthetic construct
  source 1..20: mol_type = other RNA
tgtcccctccaccccacagt

SEQ ID NO: 375 - RNA, 20 nt, synthetic construct
  source 1..20: mol_type = other RNA
tgtccctagtggccccactg

SEQ ID NO: 376 - RNA, 20 nt, synthetic construct
  source 1..20: mol_type = other RNA
tgtggctctggttctgggta

SEQ ID NO: 377 - RNA, 20 nt, synthetic construct
  source 1..20: mol_type = other RNA
tgtggggtggaggggacaga

SEQ ID NO: 378 - RNA, 20 nt, synthetic construct
  source 1..20: mol_type = other RNA
tgtgtccccgagctgggacc

SEQ ID NO: 379 - RNA, 20 nt, synthetic construct
  source 1..20: mol_type = other RNA
ttaaccggccctgggaatat

SEQ ID NO: 380 - RNA, 20 nt, synthetic construct
  source 1..20: mol_type = other RNA
ttaatgtggctctggttctg

SEQ ID NO: 381 - RNA, 20 nt, synthetic construct
  source 1..20: mol_type = other RNA
ttagacccaatatcaggaga

SEQ ID NO: 382 - RNA, 20 nt, synthetic construct
  source 1..20: mol_type = other RNA
ttaggcctcctccttcctag

SEQ ID NO: 383 - RNA, 20 nt, synthetic construct
  source 1..20: mol_type = other RNA
ttatattcccagggccggtt

SEQ ID NO: 384 - RNA, 20 nt, synthetic construct
  source 1..20: mol_type = other RNA
ttatctgtcccctccacccc

SEQ ID NO: 385 - RNA, 20 nt, synthetic construct
  source 1..20: mol_type = other RNA
ttcccagggccggttaatgt

SEQ ID NO: 386 - RNA, 20 nt, synthetic construct
  source 1..20: mol_type = other RNA
ttcctagtctcctgatattg

SEQ ID NO: 387 - RNA, 20 nt, synthetic construct
  source 1..20: mol_type = other RNA
ttctgggtacttttatctgt

SEQ ID NO: 388 - RNA, 20 nt, synthetic construct
  source 1..20: mol_type = other RNA
ttctgtcaccaatcctgtcc

SEQ ID NO: 389 - RNA, 20 nt, synthetic construct
  source 1..20: mol_type = other RNA
ttgggtctaacccccacctc

SEQ ID NO: 390 - RNA, 20 nt, synthetic construct
  source 1..20: mol_type = other RNA
ttggtgacagaaaagcccca

SEQ ID NO: 391 - RNA, 20 nt, synthetic construct
  source 1..20: mol_type = other RNA
tttatctgtcccctccaccc

SEQ ID NO: 392 - RNA, 20 nt, synthetic construct
  source 1..20: mol_type = other RNA
tttctgtcaccaatcctgtc

SEQ ID NO: 393 - RNA, 20 nt, synthetic construct
  source 1..20: mol_type = other RNA
ttttatctgtcccctccacc

SEQ ID NO: 394 - RNA, 20 nt, synthetic construct
  source 1..20: mol_type = other RNA
ttttctgtcaccaatcctgt

SEQ ID NO: 395 - RNA, 21 nt, synthetic construct
  source 1..21: mol_type = other RNA
aaaagccccatccttaggcct

SEQ ID NO: 396 - RNA, 21 nt, synthetic construct
  source 1..21: mol_type = other RNA
aaaagtacccagaaccagagc

SEQ ID NO: 397 - RNA, 21 nt, synthetic construct
  source 1..21: mol_type = other RNA
aaagccccatccttaggcctc

SEQ ID NO: 398 - RNA, 21 nt, synthetic construct
  source 1..21: mol_type = other RNA
aaagtacccagaaccagagcc

SEQ ID NO: 399 - RNA, 21 nt, synthetic construct
  source 1..21: mol_type = other RNA
aacaggaggtgggggttagac

SEQ ID NO: 400 - RNA, 21 nt, synthetic construct
  source 1..21: mol_type = other RNA
aaccagagccacattaaccgg

SEQ ID NO: 401 - RNA, 21 nt, synthetic construct
  source 1..21: mol_type = other RNA
aacccccacctcctgttaggc

SEQ ID NO: 402 - RNA, 21 nt, synthetic construct
  source 1..21: mol_type = other RNA
aaccggccctgggaatataag

SEQ ID NO: 403 - RNA, 21 nt, synthetic construct
  source 1..21: mol_type = other RNA
aagccccatccttaggcctcc

SEQ ID NO: 404 - RNA, 21 nt, synthetic construct
  source 1..21: mol_type = other RNA
aaggaatctgcctaacaggag

SEQ ID NO: 405 - RNA, 21 nt, synthetic construct
  source 1..21: mol_type = other RNA
aaggaggaggcctaaggatgg

SEQ ID NO: 406 - RNA, 21 nt, synthetic construct
  source 1..21: mol_type = other RNA
aaggatggggcttttctgtca

SEQ ID NO: 407 - RNA, 21 nt, synthetic construct
  source 1..21: mol_type = other RNA
aaggtggtcccagctcgggga

SEQ ID NO: 408 - RNA, 21 nt, synthetic construct
  source 1..21: mol_type = other RNA
aagtacccagaaccagagcca

SEQ ID NO: 409 - RNA, 21 nt, synthetic construct
  source 1..21: mol_type = other RNA
aatataaggtggtcccagctc

SEQ ID NO: 410 - RNA, 21 nt, synthetic construct
  source 1..21: mol_type = other RNA
aatatcaggagactaggaagg

SEQ ID NO: 411 - RNA, 21 nt, synthetic construct
  source 1..21: mol_type = other RNA
aatcctgtccctagtggcccc

SEQ ID NO: 412 - RNA, 21 nt, synthetic construct
  source 1..21: mol_type = other RNA
aatctgcctaacaggaggtgg

SEQ ID NO: 413 - RNA, 21 nt, synthetic construct
  source 1..21: mol_type = other RNA
aatgtggctctggttctgggt

SEQ ID NO: 414 - RNA, 21 nt, synthetic construct
  source 1..21: mol_type = other RNA
acagaaaagccccatccttag

SEQ ID NO: 415 - RNA, 21 nt, synthetic construct
  source 1..21: mol_type = other RNA
acagataaaagtacccagaac

SEQ ID NO: 416 - RNA, 21 nt, synthetic construct
  source 1..21: mol_type = other RNA
acaggaggtgggggttagacc

SEQ ID NO: 417 - RNA, 21 nt, synthetic construct
  source 1..21: mol_type = other RNA
acaggattggtgacagaaaag

SEQ ID NO: 418 - RNA, 21 nt, synthetic construct
  source 1..21: mol_type = other RNA
acagtggggccactagggaca

SEQ ID NO: 419 - RNA, 21 nt, synthetic construct
  source 1..21: mol_type = other RNA
acattaaccggccctgggaat

SEQ ID NO: 420 - RNA, 21 nt, synthetic construct
  source 1..21: mol_type = other RNA
accaatcctgtccctagtggc

SEQ ID NO: 421 - RNA, 21 nt, synthetic construct
  source 1..21: mol_type = other RNA
accaccttatattcccagggc

SEQ ID NO: 422 - RNA, 21 nt, synthetic construct
  source 1..21: mol_type = other RNA
accagagccacattaaccggc

SEQ ID NO: 423 - RNA, 21 nt, synthetic construct
  source 1..21: mol_type = other RNA
acccaatatcaggagactagg

SEQ ID NO: 424 - RNA, 21 nt, synthetic construct
  source 1..21: mol_type = other RNA
acccagaaccagagccacatt

SEQ ID NO: 425 - RNA, 21 nt, synthetic construct
  source 1..21: mol_type = other RNA
accccacagtggggccactag

SEQ ID NO: 426 - RNA, 21 nt, synthetic construct
  source 1..21: mol_type = other RNA
acccccacctcctgttaggca

SEQ ID NO: 427 - RNA, 21 nt, synthetic construct
  source 1..21: mol_type = other RNA
accggccctgggaatataagg

SEQ ID NO: 428 - RNA, 21 nt, synthetic construct
  source 1..21: mol_type = other RNA
accttatattcccagggccgg

SEQ ID NO: 429 - RNA, 21 nt, synthetic construct
  source 1..21: mol_type = other RNA
actaggaaggaggaggcctaa

SEQ ID NO: 430 - RNA, 21 nt, synthetic construct
  source 1..21: mol_type = other RNA
actagggacaggattggtgac

SEQ ID NO: 431 - RNA, 21 nt, synthetic construct
  source 1..21: mol_type = other RNA
actgtggggtggaggggacag

SEQ ID NO: 432 - RNA, 21 nt, synthetic construct
  source 1..21: mol_type = other RNA
acttttatctgtcccctccac

SEQ ID NO: 433 - RNA, 21 nt, synthetic construct
  source 1..21: mol_type = other RNA
agaaaagccccatccttaggc

SEQ ID NO: 434 - RNA, 21 nt, synthetic construct
  source 1..21: mol_type = other RNA
agaaccagagccacattaacc

SEQ ID NO: 435 - RNA, 21 nt, synthetic construct
  source 1..21: mol_type = other RNA
agacccaatatcaggagacta

SEQ ID NO: 436 - RNA, 21 nt, synthetic construct
  source 1..21: mol_type = other RNA
agactaggaaggaggaggcct

SEQ ID NO: 437 - RNA, 21 nt, synthetic construct
  source 1..21: mol_type = other RNA
agagccacattaaccggccct

SEQ ID NO: 438 - RNA, 21 nt, synthetic construct
  source 1..21: mol_type = other RNA
agataaaagtacccagaacca

SEQ ID NO: 439 - RNA, 21 nt, synthetic construct
  source 1..21: mol_type = other RNA
agataaggaatctgcctaaca

SEQ ID NO: 440 - RNA, 21 nt, synthetic construct
  source 1..21: mol_type = other RNA
agccacattaaccggccctgg

SEQ ID NO: 441 - RNA, 21 nt, synthetic construct
  source 1..21: mol_type = other RNA
agccccatccttaggcctcct

SEQ ID NO: 442 - RNA, 21 nt, synthetic construct
  source 1..21: mol_type = other RNA
agctcggggacacaggatccc

SEQ ID NO: 443 - RNA, 21 nt, synthetic construct
  source 1..21: mol_type = other RNA
agctgggaccaccttatattc

SEQ ID NO: 444 - RNA, 21 nt, synthetic construct
  source 1..21: mol_type = other RNA
aggaaggaggaggcctaagga

SEQ ID NO: 445 - RNA, 21 nt, synthetic construct
  source 1..21: mol_type = other RNA
aggaatctgcctaacaggagg

SEQ ID NO: 446 - RNA, 21 nt, synthetic construct
  source 1..21: mol_type = other RNA
aggagactaggaaggaggagg

SEQ ID NO: 447 - RNA, 21 nt, synthetic construct
  source 1..21: mol_type = other RNA
aggaggaggcctaaggatggg

SEQ ID NO: 448 - RNA, 21 nt, synthetic construct
  source 1..21: mol_type = other RNA
aggaggcctaaggatggggct

SEQ ID NO: 449 - RNA, 21 nt, synthetic construct
  source 1..21: mol_type = other RNA
aggaggtgggggttagaccca

SEQ ID NO: 450 - RNA, 21 nt, synthetic construct
  source 1..21: mol_type = other RNA
aggatggggcttttctgtcac

SEQ ID NO: 451 - RNA, 21 nt, synthetic construct
  source 1..21: mol_type = other RNA
aggattggtgacagaaaagcc

SEQ ID NO: 452 - RNA, 21 nt, synthetic construct
  source 1..21: mol_type = other RNA
aggcctaaggatggggctttt

SEQ ID NO: 453 - RNA, 21 nt, synthetic construct
  source 1..21: mol_type = other RNA
aggcctcctccttcctagtct

SEQ ID NO: 454 - RNA, 21 nt, synthetic construct
  source 1..21: mol_type = other RNA
agggacaggattggtgacaga

SEQ ID NO: 455 - RNA, 21 nt, synthetic construct
  source 1..21: mol_type = other RNA
agggatcctgtgtccccgagc

SEQ ID NO: 456 - RNA, 21 nt, synthetic construct
  source 1..21: mol_type = other RNA
agggccggttaatgtggctct

SEQ ID NO: 457 - RNA, 21 nt, synthetic construct
  source 1..21: mol_type = other RNA
aggggacagataaaagtaccc

SEQ ID NO: 458 - RNA, 21 nt, synthetic construct
  source 1..21: mol_type = other RNA
aggtgggggttagacccaata

SEQ ID NO: 459 - RNA, 21 nt, synthetic construct
  source 1..21: mol_type = other RNA
aggtggtcccagctcggggac

SEQ ID NO: 460 - RNA, 21 nt, synthetic construct
  source 1..21: mol_type = other RNA
agtacccagaaccagagccac

SEQ ID NO: 461 - RNA, 21 nt, synthetic construct
  source 1..21: mol_type = other RNA
agtctcctgatattgggtcta

SEQ ID NO: 462 - RNA, 21 nt, synthetic construct
  source 1..21: mol_type = other RNA
agtggccccactgtggggtgg

SEQ ID NO: 463 - RNA, 21 nt, synthetic construct
  source 1..21: mol_type = other RNA
agtggggccactagggacagg

SEQ ID NO: 464 - RNA, 21 nt, synthetic construct
  source 1..21: mol_type = other RNA
ataaaagtacccagaaccaga

SEQ ID NO: 465 - RNA, 21 nt, synthetic construct
  source 1..21: mol_type = other RNA
ataaggaatctgcctaacagg

SEQ ID NO: 466 - RNA, 21 nt, synthetic construct
  source 1..21: mol_type = other RNA
ataaggtggtcccagctcggg

SEQ ID NO: 467 - RNA, 21 nt, synthetic construct
  source 1..21: mol_type = other RNA
atataaggtggtcccagctcg

SEQ ID NO: 468 - RNA, 21 nt, synthetic construct
  source 1..21: mol_type = other RNA
atatcaggagactaggaagga

SEQ ID NO: 469 - RNA, 21 nt, synthetic construct
  source 1..21: mol_type = other RNA
atattcccagggccggttaat

SEQ ID NO: 470 - RNA, 21 nt, synthetic construct
  source 1..21: mol_type = other RNA
atattgggtctaacccccacc

SEQ ID NO: 471 - RNA, 21 nt, synthetic construct
  source 1..21: mol_type = other RNA
atcaggagactaggaaggagg

SEQ ID NO: 472 - RNA, 21 nt, synthetic construct
  source 1..21: mol_type = other RNA
atcctgtccctagtggcccca

SEQ ID NO: 473 - RNA, 21 nt, synthetic construct
  source 1..21: mol_type = other RNA
atcctgtgtccccgagctggg

SEQ ID NO: 474 - RNA, 21 nt, synthetic construct
  source 1..21: mol_type = other RNA
atccttaggcctcctccttcc

SEQ ID NO: 475 - RNA, 21 nt, synthetic construct
  source 1..21: mol_type = other RNA
atctgcctaacaggaggtggg

SEQ ID NO: 476 - RNA, 21 nt, synthetic construct
  source 1..21: mol_type = other RNA
atctgtcccctccaccccaca

SEQ ID NO: 477 - RNA, 21 nt, synthetic construct
  source 1..21: mol_type = other RNA
atggggcttttctgtcaccaa

SEQ ID NO: 478 - RNA, 21 nt, synthetic construct
  source 1..21: mol_type = other RNA
atgtggctctggttctgggta

SEQ ID NO: 479 - RNA, 21 nt, synthetic construct
  source 1..21: mol_type = other RNA
attaaccggccctgggaatat

SEQ ID NO: 480 - RNA, 21 nt, synthetic construct
  source 1..21: mol_type = other RNA
attcccagggccggttaatgt

SEQ ID NO: 481 - RNA, 21 nt, synthetic construct
  source 1..21: mol_type = other RNA
attgggtctaacccccacctc

SEQ ID NO: 482 - RNA, 21 nt, synthetic construct
  source 1..21: mol_type = other RNA
attggtgacagaaaagcccca

SEQ ID NO: 483 - RNA, 21 nt, synthetic construct
  source 1..21: mol_type = other RNA
caatatcaggagactaggaag

SEQ ID NO: 484 - RNA, 21 nt, synthetic construct
  source 1..21: mol_type = other RNA
caatcctgtccctagtggccc

SEQ ID NO: 485 - RNA, 21 nt, synthetic construct
  source 1..21: mol_type = other RNA
cacagtggggccactagggac

SEQ ID NO: 486 - RNA, 21 nt, synthetic construct
  source 1..21: mol_type = other RNA
cacattaaccggccctgggaa

SEQ ID NO: 487 - RNA, 21 nt, synthetic construct
  source 1..21: mol_type = other RNA
caccaatcctgtccctagtgg

SEQ ID NO: 488 - RNA, 21 nt, synthetic construct
  source 1..21: mol_type = other RNA
caccccacagtggggccacta

SEQ ID NO: 489 - RNA, 21 nt, synthetic construct
  source 1..21: mol_type = other RNA
cacctcctgttaggcagattc

SEQ ID NO: 490 - RNA, 21 nt, synthetic construct
  source 1..21: mol_type = other RNA
caccttatattcccagggccg

SEQ ID NO: 491 - RNA, 21 nt, synthetic construct
  source 1..21: mol_type = other RNA
cactagggacaggattggtga

SEQ ID NO: 492 - RNA, 21 nt, synthetic construct
  source 1..21: mol_type = other RNA
cactgtggggtggaggggaca

SEQ ID NO: 493 - RNA, 21 nt, synthetic construct
  source 1..21: mol_type = other RNA
cagaaaagccccatccttagg

SEQ ID NO: 494 - RNA, 21 nt, synthetic construct
  source 1..21: mol_type = other RNA
cagaaccagagccacattaac

SEQ ID NO: 495 - RNA, 21 nt, synthetic construct
  source 1..21: mol_type = other RNA
cagagccacattaaccggccc

SEQ ID NO: 496 - RNA, 21 nt, synthetic construct
  source 1..21: mol_type = other RNA
cagataaaagtacccagaacc

SEQ ID NO: 497 - RNA, 21 nt, synthetic construct
  source 1..21: mol_type = other RNA
cagataaggaatctgcctaac

SEQ ID NO: 498 - RNA, 21 nt, synthetic construct
  source 1..21: mol_type = other RNA
cagctcggggacacaggatcc

SEQ ID NO: 499 - RNA, 21 nt, synthetic construct
  source 1..21: mol_type = other RNA
caggagactaggaaggaggag

SEQ ID NO: 500 - RNA, 21 nt, synthetic construct
  source 1..21: mol_type = other RNA
caggaggtgggggttagaccc

SEQ ID NO: 501 - RNA, 21 nt, synthetic construct
  source 1..21: mol_type = other RNA
caggattggtgacagaaaagc

SEQ ID NO: 502 - RNA, 21 nt, synthetic construct
  source 1..21: mol_type = other RNA
cagggatcctgtgtccccgag

SEQ ID NO: 503 - RNA, 21 nt, synthetic construct
  source 1..21: mol_type = other RNA
cagggccggttaatgtggctc

SEQ ID NO: 504 - RNA, 21 nt, synthetic construct
  source 1..21: mol_type = other RNA
cagtggggccactagggacag

SEQ ID NO: 505 - RNA, 21 nt, synthetic construct
  source 1..21: mol_type = other RNA
catccttaggcctcctccttc

SEQ ID NO: 506 - RNA, 21 nt, synthetic construct
  source 1..21: mol_type = other RNA
cattaaccggccctgggaata

SEQ ID NO: 507 - RNA, 21 nt, synthetic construct
  source 1..21: mol_type = other RNA
ccaatatcaggagactaggaa

SEQ ID NO: 508 - RNA, 21 nt, synthetic construct
  source 1..21: mol_type = other RNA
ccaatcctgtccctagtggcc

SEQ ID NO: 509 - RNA, 21 nt, synthetic construct
  source 1..21: mol_type = other RNA
ccacagtggggccactaggga

SEQ ID NO: 510 - RNA, 21 nt, synthetic construct
  source 1..21: mol_type = other RNA
ccacattaaccggccctggga

SEQ ID NO: 511 - RNA, 21 nt, synthetic construct
  source 1..21: mol_type = other RNA
ccaccccacagtggggccact

SEQ ID NO: 512 - RNA, 21 nt, synthetic construct
  source 1..21: mol_type = other RNA
ccacctcctgttaggcagatt

SEQ ID NO: 513 - RNA, 21 nt, synthetic construct
  source 1..21: mol_type = other RNA
ccaccttatattcccagggcc

SEQ ID NO: 514 - RNA, 21 nt, synthetic construct
  source 1..21: mol_type = other RNA
ccactagggacaggattggtg

SEQ ID NO: 515 - RNA, 21 nt, synthetic construct
  source 1..21: mol_type = other RNA
ccactgtggggtggaggggac

SEQ ID NO: 516 - RNA, 21 nt, synthetic construct
  source 1..21: mol_type = other RNA
ccagaaccagagccacattaa

SEQ ID NO: 517 - RNA, 21 nt, synthetic construct
  source 1..21: mol_type = other RNA
ccagagccacattaaccggcc

SEQ ID NO: 518 - RNA, 21 nt, synthetic construct
  source 1..21: mol_type = other RNA
ccagctcggggacacaggatc

SEQ ID NO: 519 - RNA, 21 nt, synthetic construct
  source 1..21: mol_type = other RNA
ccagggatcctgtgtccccga

SEQ ID NO: 520 - RNA, 21 nt, synthetic construct
  source 1..21: mol_type = other RNA
ccagggccggttaatgtggct

SEQ ID NO: 521 - RNA, 21 nt, synthetic construct
  source 1..21: mol_type = other RNA
ccatccttaggcctcctcctt

SEQ ID NO: 522 - RNA, 21 nt, synthetic construct
  source 1..21: mol_type = other RNA
cccaatatcaggagactagga

SEQ ID NO: 523 - RNA, 21 nt, synthetic construct
  source 1..21: mol_type = other RNA
cccacagtggggccactaggg

SEQ ID NO: 524 - RNA, 21 nt, synthetic construct
  source 1..21: mol_type = other RNA
cccacctcctgttaggcagat

SEQ ID NO: 525 - RNA, 21 nt, synthetic construct
  source 1..21: mol_type = other RNA
cccactgtggggtggagggga

SEQ ID NO: 526 - RNA, 21 nt, synthetic construct
  source 1..21: mol_type = other RNA
cccagaaccagagccacatta

SEQ ID NO: 527 - RNA, 21 nt, synthetic construct
  source 1..21: mol_type = other RNA
cccagctcggggacacaggat

SEQ ID NO: 528 - RNA, 21 nt, synthetic construct
  source 1..21: mol_type = other RNA
cccagggccggttaatgtggc

SEQ ID NO: 529 - RNA, 21 nt, synthetic construct
  source 1..21: mol_type = other RNA
cccatccttaggcctcctcct

SEQ ID NO: 530 - RNA, 21 nt, synthetic construct
  source 1..21: mol_type = other RNA
ccccacagtggggccactagg

SEQ ID NO: 531 - RNA, 21 nt, synthetic construct
  source 1..21: mol_type = other RNA
ccccacctcctgttaggcaga

SEQ ID NO: 532 - RNA, 21 nt, synthetic construct
  source 1..21: mol_type = other RNA
ccccactgtggggtggagggg

SEQ ID NO: 533 - RNA, 21 nt, synthetic construct
  source 1..21: mol_type = other RNA
ccccatccttaggcctcctcc

SEQ ID NO: 534 - RNA, 21 nt, synthetic construct
  source 1..21: mol_type = other RNA
cccccacctcctgttaggcag

SEQ ID NO: 535 - RNA, 21 nt, synthetic construct
  source 1..21: mol_type = other RNA
ccccgagctgggaccacctta

SEQ ID NO: 536 - RNA, 21 nt, synthetic construct
  source 1..21: mol_type = other RNA
cccctccaccccacagtgggg

SEQ ID NO: 537 - RNA, 21 nt, synthetic construct
  source 1..21: mol_type = other RNA
cccgagctgggaccaccttat

SEQ ID NO: 538 - RNA, 21 nt, synthetic construct
  source 1..21: mol_type = other RNA
ccctagtggccccactgtggg

SEQ ID NO: 539 - RNA, 21 nt, synthetic construct
  source 1..21: mol_type = other RNA
ccctccaccccacagtggggc

SEQ ID NO: 540 - RNA, 21 nt, synthetic construct
  source 1..21: mol_type = other RNA
ccctgggaatataaggtggtc

SEQ ID NO: 541 - RNA, 21 nt, synthetic construct
  source 1..21: mol_type = other RNA
ccgagctgggaccaccttata

SEQ ID NO: 542 - RNA, 21 nt, synthetic construct
  source 1..21: mol_type = other RNA
ccggccctgggaatataaggt

SEQ ID NO: 543 - RNA, 21 nt, synthetic construct
  source 1..21: mol_type = other RNA
ccggttaatgtggctctggtt

SEQ ID NO: 544 - RNA, 21 nt, synthetic construct
  source 1..21: mol_type = other RNA
cctaacaggaggtgggggtta

SEQ ID NO: 545 - RNA, 21 nt, synthetic construct
  source 1..21: mol_type = other RNA
cctaaggatggggcttttctg

SEQ ID NO: 546 - RNA, 21 nt, synthetic construct
  source 1..21: mol_type = other RNA
cctagtctcctgatattgggt

SEQ ID NO: 547 - RNA, 21 nt, synthetic construct
  source 1..21: mol_type = other RNA
cctagtggccccactgtgggg

SEQ ID NO: 548 - RNA, 21 nt, synthetic construct
  source 1..21: mol_type = other RNA
cctccaccccacagtggggcc

SEQ ID NO: 549 - RNA, 21 nt, synthetic construct
  source 1..21: mol_type = other RNA
cctccagggatcctgtgtccc

SEQ ID NO: 550 - RNA, 21 nt, synthetic construct
  source 1..21: mol_type = other RNA
cctcctccttcctagtctcct

SEQ ID NO: 551 - RNA, 21 nt, synthetic construct
  source 1..21: mol_type = other RNA
cctccttcctagtctcctgat

SEQ ID NO: 552 - RNA, 21 nt, synthetic construct
  source 1..21: mol_type = other RNA
cctgatattgggtctaacccc

SEQ ID NO: 553 - RNA, 21 nt, synthetic construct
  source 1..21: mol_type = other RNA
cctgggaatataaggtggtcc

SEQ ID NO: 554 - RNA, 21 nt, synthetic construct
  source 1..21: mol_type = other RNA
cctgtccctagtggccccact

SEQ ID NO: 555 - RNA, 21 nt, synthetic construct
  source 1..21: mol_type = other RNA
cctgtgtccccgagctgggac

SEQ ID NO: 556 - RNA, 21 nt, synthetic construct
  source 1..21: mol_type = other RNA
ccttaggcctcctccttccta

SEQ ID NO: 557 - RNA, 21 nt, synthetic construct
  source 1..21: mol_type = other RNA
ccttatattcccagggccggt

SEQ ID NO: 558 - RNA, 21 nt, synthetic construct
  source 1..21: mol_type = other RNA
ccttcctagtctcctgatatt

SEQ ID NO: 559 - RNA, 21 nt, synthetic construct
  source 1..21: mol_type = other RNA
cgagctgggaccaccttatat

SEQ ID NO: 560 - RNA, 21 nt, synthetic construct
  source 1..21: mol_type = other RNA
cggccctgggaatataaggtg

SEQ ID NO: 561 - RNA, 21 nt, synthetic construct
  source 1..21: mol_type = other RNA
cggttaatgtggctctggttc

SEQ ID NO: 562 - RNA, 21 nt, synthetic construct
  source 1..21: mol_type = other RNA
ctaacaggaggtgggggttag

SEQ ID NO: 563 - RNA, 21 nt, synthetic construct
  source 1..21: mol_type = other RNA
ctaacccccacctcctgttag

SEQ ID NO: 564 - RNA, 21 nt, synthetic construct
  source 1..21: mol_type = other RNA
ctaaggatggggcttttctgt

SEQ ID NO: 565 - RNA, 21 nt, synthetic construct
  source 1..21: mol_type = other RNA
ctaggaaggaggaggcctaag

SEQ ID NO: 566 - RNA, 21 nt, synthetic construct
  source 1..21: mol_type = other RNA
ctagggacaggattggtgaca

SEQ ID NO: 567 - RNA, 21 nt, synthetic construct
  source 1..21: mol_type = other RNA
ctagtctcctgatattgggtc

SEQ ID NO: 568 - RNA, 21 nt, synthetic construct
  source 1..21: mol_type = other RNA
ctagtggccccactgtggggt

SEQ ID NO: 569 - RNA, 21 nt, synthetic construct
  source 1..21: mol_type = other RNA
ctccaccccacagtggggcca

SEQ ID NO: 570 - RNA, 21 nt, synthetic construct
  source 1..21: mol_type = other RNA
ctccagggatcctgtgtcccc

SEQ ID NO: 571 - RNA, 21 nt, synthetic construct
  source 1..21: mol_type = other RNA
ctcctccttcctagtctcctg

SEQ ID NO: 572 - RNA, 21 nt, synthetic construct
  source 1..21: mol_type = other RNA
ctcctgatattgggtctaacc

SEQ ID NO: 573 - RNA, 21 nt, synthetic construct
  source 1..21: mol_type = other RNA
ctccttcctagtctcctgata

SEQ ID NO: 574 - RNA, 21 nt, synthetic construct
  source 1..21: mol_type = other RNA
ctctggttctgggtactttta

SEQ ID NO: 575 - RNA, 21 nt, synthetic construct
  source 1..21: mol_type = other RNA
ctgatattgggtctaaccccc

SEQ ID NO: 576 - RNA, 21 nt, synthetic construct
  source 1..21: mol_type = other RNA
ctgcctaacaggaggtggggg

SEQ ID NO: 577 - RNA, 21 nt, synthetic construct
  source 1..21: mol_type = other RNA
ctgcctccagggatcctgtgt

SEQ ID NO: 578 - RNA, 21 nt, synthetic construct
  source 1..21: mol_type = other RNA
ctgggaatataaggtggtccc

SEQ ID NO: 579 - RNA, 21 nt, synthetic construct
  source 1..21: mol_type = other RNA
ctgggaccaccttatattccc

SEQ ID NO: 580 - RNA, 21 nt, synthetic construct
  source 1..21: mol_type = other RNA
ctgggtacttttatctgtccc

SEQ ID NO: 581 - RNA, 21 nt, synthetic construct
  source 1..21: mol_type = other RNA
ctggttctgggtacttttatc

SEQ ID NO: 582 - RNA, 21 nt, synthetic construct
  source 1..21: mol_type = other RNA
ctgtcaccaatcctgtcccta

SEQ ID NO: 583 - RNA, 21 nt, synthetic construct
  source 1..21: mol_type = other RNA
ctgtcccctccaccccacagt

SEQ ID NO: 584 - RNA, 21 nt, synthetic construct
  source 1..21: mol_type = other RNA
ctgtccctagtggccccactg

SEQ ID NO: 585 - RNA, 21 nt, synthetic construct
  source 1..21: mol_type = other RNA
ctgtggggtggaggggacaga

SEQ ID NO: 586 - RNA, 21 nt, synthetic construct
  source 1..21: mol_type = other RNA
ctgtgtccccgagctgggacc

SEQ ID NO: 587 - RNA, 21 nt, synthetic construct
  source 1..21: mol_type = other RNA
cttaggcctcctccttcctag

SEQ ID NO: 588 - RNA, 21 nt, synthetic construct
  source 1..21: mol_type = other RNA
cttatattcccagggccggtt

SEQ ID NO: 589 - RNA, 21 nt, synthetic construct
  source 1..21: mol_type = other RNA
cttcctagtctcctgatattg

SEQ ID NO: 590 - RNA, 21 nt, synthetic construct
  source 1..21: mol_type = other RNA
cttttatctgtcccctccacc

SEQ ID NO: 591 - RNA, 21 nt, synthetic construct
  source 1..21: mol_type = other RNA
cttttctgtcaccaatcctgt

SEQ ID NO: 592 - RNA, 21 nt, synthetic construct
  source 1..21: mol_type = other RNA
gaaaagccccatccttaggcc

SEQ ID NO: 593 - RNA, 21 nt, synthetic construct
  source 1..21: mol_type = other RNA
gaaccagagccacattaaccg

SEQ ID NO: 594 - RNA, 21 nt, synthetic construct
  source 1..21: mol_type = other RNA
gaaggaggaggcctaaggatg

SEQ ID NO: 595 - RNA, 21 nt, synthetic construct
  source 1..21: mol_type = other RNA
gaatataaggtggtcccagct

SEQ ID NO: 596 - RNA, 21 nt, synthetic construct
  source 1..21: mol_type = other RNA
gaatctgcctaacaggaggtg

SEQ ID NO: 597 - RNA, 21 nt, synthetic construct
  source 1..21: mol_type = other RNA
gacagaaaagccccatcctta

SEQ ID NO: 598 - RNA, 21 nt, synthetic construct
  source 1..21: mol_type = other RNA
gacagataaaagtacccagaa

SEQ ID NO: 599 - RNA, 21 nt, synthetic construct
  source 1..21: mol_type = other RNA
gacaggattggtgacagaaaa

SEQ ID NO: 600 - RNA, 21 nt, synthetic construct
  source 1..21: mol_type = other RNA
gaccaccttatattcccaggg

SEQ ID NO: 601 - RNA, 21 nt, synthetic construct
  source 1..21: mol_type = other RNA
gacccaatatcaggagactag

SEQ ID NO: 602 - RNA, 21 nt, synthetic construct
  source 1..21: mol_type = other RNA
gactaggaaggaggaggccta

SEQ ID NO: 603 - RNA, 21 nt, synthetic construct
  source 1..21: mol_type = other RNA
gagactaggaaggaggaggcc

SEQ ID NO: 604 - RNA, 21 nt, synthetic construct
  source 1..21: mol_type = other RNA
gagccacattaaccggccctg

SEQ ID NO: 605 - RNA, 21 nt, synthetic construct
  source 1..21: mol_type = other RNA
gagctgggaccaccttatatt

SEQ ID NO: 606 - RNA, 21 nt, synthetic construct
  source 1..21: mol_type = other RNA
gaggaggcctaaggatggggc

SEQ ID NO: 607 - RNA, 21 nt, synthetic construct
  source 1..21: mol_type = other RNA
gaggcctaaggatggggcttt

SEQ ID NO: 608 - RNA, 21 nt, synthetic construct
  source 1..21: mol_type = other RNA
gaggggacagataaaagtacc

SEQ ID NO: 609 - RNA, 21 nt, synthetic construct
  source 1..21: mol_type = other RNA
gaggtgggggttagacccaat

SEQ ID NO: 610 - RNA, 21 nt, synthetic construct
  source 1..21: mol_type = other RNA
gataaaagtacccagaaccag

SEQ ID NO: 611 - RNA, 21 nt, synthetic construct
  source 1..21: mol_type = other RNA
gataaggaatctgcctaacag

SEQ ID NO: 612 - RNA, 21 nt, synthetic construct
  source 1..21: mol_type = other RNA
gatattgggtctaacccccac

SEQ ID NO: 613 - RNA, 21 nt, synthetic construct
  source 1..21: mol_type = other RNA
gatcctgtgtccccgagctgg

SEQ ID NO: 614 - RNA, 21 nt, synthetic construct
  source 1..21: mol_type = other RNA
gatggggcttttctgtcacca

SEQ ID NO: 615 - RNA, 21 nt, synthetic construct
  source 1..21: mol_type = other RNA
gattggtgacagaaaagcccc

SEQ ID NO: 616 - RNA, 21 nt, synthetic construct
  source 1..21: mol_type = other RNA
gccacattaaccggccctggg

SEQ ID NO: 617 - RNA, 21 nt, synthetic construct
  source 1..21: mol_type = other RNA
gccactagggacaggattggt

SEQ ID NO: 618 - RNA, 21 nt, synthetic construct
  source 1..21: mol_type = other RNA
gccccactgtggggtggaggg

SEQ ID NO: 619 - RNA, 21 nt, synthetic construct
  source 1..21: mol_type = other RNA
gccccatccttaggcctcctc

SEQ ID NO: 620 - RNA, 21 nt, synthetic construct
  source 1..21: mol_type = other RNA
gccctgggaatataaggtggt

SEQ ID NO: 621 - RNA, 21 nt, synthetic construct
  source 1..21: mol_type = other RNA
gccggttaatgtggctctggt

SEQ ID NO: 622 - RNA, 21 nt, synthetic construct
  source 1..21: mol_type = other RNA
gcctaacaggaggtgggggtt

SEQ ID NO: 623 - RNA, 21 nt, synthetic construct
  source 1..21: mol_type = other RNA
gcctaaggatggggcttttct

SEQ ID NO: 624 - RNA, 21 nt, synthetic construct
  source 1..21: mol_type = other RNA
gcctccagggatcctgtgtcc

SEQ ID NO: 625 - RNA, 21 nt, synthetic construct
  source 1..21: mol_type = other RNA
gcctcctccttcctagtctcc

SEQ ID NO: 626 - RNA, 21 nt, synthetic construct
  source 1..21: mol_type = other RNA
gctcggggacacaggatccct

SEQ ID NO: 627 - RNA, 21 nt, synthetic construct
  source 1..21: mol_type = other RNA
gctctggttctgggtactttt

SEQ ID NO: 628 - RNA, 21 nt, synthetic construct
  source 1..21: mol_type = other RNA
gctgggaccaccttatattcc

SEQ ID NO: 629 - RNA, 21 nt, synthetic construct
  source 1..21: mol_type = other RNA
gcttttctgtcaccaatcctg

SEQ ID NO: 630 - RNA, 21 nt, synthetic construct
  source 1..21: mol_type = other RNA
ggaaggaggaggcctaaggat

SEQ ID NO: 631 - RNA, 21 nt, synthetic construct
  source 1..21: mol_type = other RNA
ggaatataaggtggtcccagc

SEQ ID NO: 632 - RNA, 21 nt, synthetic construct
  source 1..21: mol_type = other RNA
ggaatctgcctaacaggaggt

SEQ ID NO: 633 - RNA, 21 nt, synthetic construct
  source 1..21: mol_type = other RNA
ggacagataaaagtacccaga

SEQ ID NO: 634 - RNA, 21 nt, synthetic construct
  source 1..21: mol_type = other RNA
ggacaggattggtgacagaaa

SEQ ID NO: 635 - RNA, 21 nt, synthetic construct
  source 1..21: mol_type = other RNA
ggaccaccttatattcccagg

SEQ ID NO: 636 - RNA, 21 nt, synthetic construct
  source 1..21: mol_type = other RNA
ggagactaggaaggaggaggc

SEQ ID NO: 637 - RNA, 21 nt, synthetic construct
  source 1..21: mol_type = other RNA
ggaggaggcctaaggatgggg

SEQ ID NO: 638 - RNA, 21 nt, synthetic construct
  source 1..21: mol_type = other RNA
ggaggcctaaggatggggctt

SEQ ID NO: 639 - RNA, 21 nt, synthetic construct
  source 1..21: mol_type = other RNA
ggaggggacagataaaagtac

SEQ ID NO: 640 - RNA, 21 nt, synthetic construct
  source 1..21: mol_type = other RNA
ggaggtgggggttagacccaa

SEQ ID NO: 641 - RNA, 21 nt, synthetic construct
  source 1..21: mol_type = other RNA
ggatcctgtgtccccgagctg

SEQ ID NO: 642 - RNA, 21 nt, synthetic construct
  source 1..21: mol_type = other RNA
ggatggggcttttctgtcacc

SEQ ID NO: 643 - RNA, 21 nt, synthetic construct
  source 1..21: mol_type = other RNA
ggattggtgacagaaaagccc

SEQ ID NO: 644 - RNA, 21 nt, synthetic construct
  source 1..21: mol_type = other RNA
ggccactagggacaggattgg

SEQ ID NO: 645 - RNA, 21 nt, synthetic construct
  source 1..21: mol_type = other RNA
ggccccactgtggggtggagg

SEQ ID NO: 646 - RNA, 21 nt, synthetic construct
  source 1..21: mol_type = other RNA
ggccctgggaatataaggtgg

SEQ ID NO: 647 - RNA, 21 nt, synthetic construct
  source 1..21: mol_type = other RNA
ggccggttaatgtggctctgg

SEQ ID NO: 648 - RNA, 21 nt, synthetic construct
  source 1..21: mol_type = other RNA
ggcctaaggatggggcttttc

SEQ ID NO: 649 - RNA, 21 nt, synthetic construct
  source 1..21: mol_type = other RNA
ggcctcctccttcctagtctc

SEQ ID NO: 650 - RNA, 21 nt, synthetic construct
  source 1..21: mol_type = other RNA
ggctctggttctgggtacttt

SEQ ID NO: 651 - RNA, 21 nt, synthetic construct
  source 1..21: mol_type = other RNA
ggcttttctgtcaccaatcct

SEQ ID NO: 652 - RNA, 21 nt, synthetic construct
  source 1..21: mol_type = other RNA
gggaatataaggtggtcccag

SEQ ID NO: 653 - RNA, 21 nt, synthetic construct
  source 1..21: mol_type = other RNA
gggacagataaaagtacccag

SEQ ID NO: 654 - RNA, 21 nt, synthetic construct
  source 1..21: mol_type = other RNA
gggacaggattggtgacagaa

SEQ ID NO: 655 - RNA, 21 nt, synthetic construct
  source 1..21: mol_type = other RNA
gggaccaccttatattcccag

SEQ ID NO: 656 - RNA, 21 nt, synthetic construct
  source 1..21: mol_type = other RNA
gggatcctgtgtccccgagct

SEQ ID NO: 657 - RNA, 21 nt, synthetic construct
  source 1..21: mol_type = other RNA
gggccactagggacaggattg

SEQ ID NO: 658 - RNA, 21 nt, synthetic construct
  source 1..21: mol_type = other RNA
gggccggttaatgtggctctg

SEQ ID NO: 659 - RNA, 21 nt, synthetic construct
  source 1..21: mol_type = other RNA
gggcttttctgtcaccaatcc

SEQ ID NO: 660 - RNA, 21 nt, synthetic construct
  source 1..21: mol_type = other RNA
ggggacagataaaagtaccca

SEQ ID NO: 661 - RNA, 21 nt, synthetic construct
  source 1..21: mol_type = other RNA
ggggccactagggacaggatt

SEQ ID NO: 662 - RNA, 21 nt, synthetic construct
  source 1..21: mol_type = other RNA
ggggcttttctgtcaccaatc

SEQ ID NO: 663 - RNA, 21 nt, synthetic construct
  source 1..21: mol_type = other RNA
gggggttagacccaatatcag

SEQ ID NO: 664 - RNA, 21 nt, synthetic construct
  source 1..21: mol_type = other RNA
ggggtggaggggacagataaa

SEQ ID NO: 665 - RNA, 21 nt, synthetic construct
  source 1..21: mol_type = other RNA
ggggttagacccaatatcagg

SEQ ID NO: 666 - RNA, 21 nt, synthetic construct
  source 1..21: mol_type = other RNA
gggtacttttatctgtcccct

SEQ ID NO: 667 - RNA, 21 nt, synthetic construct
  source 1..21: mol_type = other RNA
gggtctaacccccacctcctg

SEQ ID NO: 668 - RNA, 21 nt, synthetic construct
  source 1..21: mol_type = other RNA
gggtggaggggacagataaaa

SEQ ID NO: 669 - RNA, 21 nt, synthetic construct
  source 1..21: mol_type = other RNA
gggttagacccaatatcagga

SEQ ID NO: 670 - RNA, 21 nt, synthetic construct
  source 1..21: mol_type = other RNA
ggtacttttatctgtcccctc

SEQ ID NO: 671 - RNA, 21 nt, synthetic construct
  source 1..21: mol_type = other RNA
ggtcccagctcggggacacag

SEQ ID NO: 672 - RNA, 21 nt, synthetic construct
  source 1..21: mol_type = other RNA
ggtctaacccccacctcctgt

SEQ ID NO: 673 - RNA, 21 nt, synthetic construct
  source 1..21: mol_type = other RNA
ggtgacagaaaagccccatcc

SEQ ID NO: 674 - RNA, 21 nt, synthetic construct
  source 1..21: mol_type = other RNA
ggtggaggggacagataaaag

SEQ ID NO: 675 - RNA, 21 nt, synthetic construct
  source 1..21: mol_type = other RNA
ggtgggggttagacccaatat

SEQ ID NO: 676 - RNA, 21 nt, synthetic construct
  source 1..21: mol_type = other RNA
ggtggtcccagctcggggaca

SEQ ID NO: 677 - RNA, 21 nt, synthetic construct
  source 1..21: mol_type = other RNA
ggttaatgtggctctggttct

SEQ ID NO: 678 - RNA, 21 nt, synthetic construct
  source 1..21: mol_type = other RNA
ggttagacccaatatcaggag

SEQ ID NO: 679 - RNA, 21 nt, synthetic construct
  source 1..21: mol_type = other RNA
ggttctgggtacttttatctg

SEQ ID NO: 680 - RNA, 21 nt, synthetic construct
  source 1..21: mol_type = other RNA
gtacccagaaccagagccaca

SEQ ID NO: 681 - RNA, 21 nt, synthetic construct
  source 1..21: mol_type = other RNA
gtacttttatctgtcccctcc

SEQ ID NO: 682 - RNA, 21 nt, synthetic construct
  source 1..21: mol_type = other RNA
gtcaccaatcctgtccctagt

SEQ ID NO: 683 - RNA, 21 nt, synthetic construct
  source 1..21: mol_type = other RNA
gtcccagctcggggacacagg

SEQ ID NO: 684 - RNA, 21 nt, synthetic construct
  source 1..21: mol_type = other RNA
gtccccgagctgggaccacct

SEQ ID NO: 685 - RNA, 21 nt, synthetic construct
  source 1..21: mol_type = other RNA
gtcccctccaccccacagtgg

SEQ ID NO: 686 - RNA, 21 nt, synthetic construct
  source 1..21: mol_type = other RNA
gtccctagtggccccactgtg

SEQ ID NO: 687 - RNA, 21 nt, synthetic construct
  source 1..21: mol_type = other RNA
gtctaacccccacctcctgtt

SEQ ID NO: 688 - RNA, 21 nt, synthetic construct
  source 1..21: mol_type = other RNA
gtctcctgatattgggtctaa

SEQ ID NO: 689 - RNA, 21 nt, synthetic construct
  source 1..21: mol_type = other RNA
gtgacagaaaagccccatcct

SEQ ID NO: 690 - RNA, 21 nt, synthetic construct
  source 1..21: mol_type = other RNA
gtggaggggacagataaaagt

SEQ ID NO: 691 - RNA, 21 nt, synthetic construct
  source 1..21: mol_type = other RNA
gtggccccactgtggggtgga

SEQ ID NO: 692 - RNA, 21 nt, synthetic construct
  source 1..21: mol_type = other RNA
gtggctctggttctgggtact

SEQ ID NO: 693 - RNA, 21 nt, synthetic construct
  source 1..21: mol_type = other RNA
gtggggccactagggacagga

SEQ ID NO: 694 - RNA, 21 nt, synthetic construct
  source 1..21: mol_type = other RNA
gtgggggttagacccaatatc

SEQ ID NO: 695 - RNA, 21 nt, synthetic construct
  source 1..21: mol_type = other RNA
gtggggtggaggggacagata

SEQ ID NO: 696 - RNA, 21 nt, synthetic construct
  source 1..21: mol_type = other RNA
gtggtcccagctcggggacac

SEQ ID NO: 697 - RNA, 21 nt, synthetic construct
  source 1..21: mol_type = other RNA
gtgtccccgagctgggaccac

SEQ ID NO: 698 - RNA, 21 nt, synthetic construct
  source 1..21: mol_type = other RNA
gttaatgtggctctggttctg

SEQ ID NO: 699 - RNA, 21 nt, synthetic construct
  source 1..21: mol_type = other RNA
gttagacccaatatcaggaga

SEQ ID NO: 700 - RNA, 21 nt, synthetic construct
  source 1..21: mol_type = other RNA
gttctgggtacttttatctgt

SEQ ID NO: 701 - RNA, 21 nt, synthetic construct
  source 1..21: mol_type = other RNA
taaaagtacccagaaccagag

SEQ ID NO: 702 - RNA, 21 nt, synthetic construct
  source 1..21: mol_type = other RNA
taacaggaggtgggggttaga

SEQ ID NO: 703 - RNA, 21 nt, synthetic construct
  source 1..21: mol_type = other RNA
taacccccacctcctgttagg

SEQ ID NO: 704 - RNA, 21 nt, synthetic construct
  source 1..21: mol_type = other RNA
taaccggccctgggaatataa

SEQ ID NO: 705 - RNA, 21 nt, synthetic construct
  source 1..21: mol_type = other RNA
taaggaatctgcctaacagga

SEQ ID NO: 706 - RNA, 21 nt, synthetic construct
  source 1..21: mol_type = other RNA
taaggatggggcttttctgtc

SEQ ID NO: 707 - RNA, 21 nt, synthetic construct
  source 1..21: mol_type = other RNA
taaggtggtcccagctcgggg

SEQ ID NO: 708 - RNA, 21 nt, synthetic construct
  source 1..21: mol_type = other RNA
taatgtggctctggttctggg

SEQ ID NO: 709 - RNA, 21 nt, synthetic construct
  source 1..21: mol_type = other RNA
tacccagaaccagagccacat

SEQ ID NO: 710 - RNA, 21 nt, synthetic construct
  source 1..21: mol_type = other RNA
tacttttatctgtcccctcca

SEQ ID NO: 711 - RNA, 21 nt, synthetic construct
  source 1..21: mol_type = other RNA
tagacccaatatcaggagact

SEQ ID NO: 712 - RNA, 21 nt, synthetic construct
  source 1..21: mol_type = other RNA
taggaaggaggaggcctaagg

SEQ ID NO: 713 - RNA, 21 nt, synthetic construct
  source 1..21: mol_type = other RNA
taggcctcctccttcctagtc

SEQ ID NO: 714 - RNA, 21 nt, synthetic construct
  source 1..21: mol_type = other RNA
tagggacaggattggtgacag

SEQ ID NO: 715 - RNA, 21 nt, synthetic construct
  source 1..21: mol_type = other RNA
tagtctcctgatattgggtct

SEQ ID NO: 716 - RNA, 21 nt, synthetic construct
  source 1..21: mol_type = other RNA
tagtggccccactgtggggtg

SEQ ID NO: 717 - RNA, 21 nt, synthetic construct
  source 1..21: mol_type = other RNA
tataaggtggtcccagctcgg

SEQ ID NO: 718 - RNA, 21 nt, synthetic construct
  source 1..21: mol_type = other RNA
tatattcccagggccggttaa

SEQ ID NO: 719 - RNA, 21 nt, synthetic construct
  source 1..21: mol_type = other RNA
tatcaggagactaggaaggag

SEQ ID NO: 720 - RNA, 21 nt, synthetic construct
  source 1..21: mol_type = other RNA
tatctgtcccctccaccccac

SEQ ID NO: 721 - RNA, 21 nt, synthetic construct
  source 1..21: mol_type = other RNA
tattcccagggccggttaatg

SEQ ID NO: 722 - RNA, 21 nt, synthetic construct
  source 1..21: mol_type = other RNA
tattgggtctaacccccacct

SEQ ID NO: 723 - RNA, 21 nt, synthetic construct
  source 1..21: mol_type = other RNA
tcaccaatcctgtccctagtg

SEQ ID NO: 724 - RNA, 21 nt, synthetic construct
  source 1..21: mol_type = other RNA
tcaggagactaggaaggagga

SEQ ID NO: 725 - RNA, 21 nt, synthetic construct
  source 1..21: mol_type = other RNA
tccaccccacagtggggccac

SEQ ID NO: 726 - RNA, 21 nt, synthetic construct
  source 1..21: mol_type = other RNA
tccagggatcctgtgtccccg

SEQ ID NO: 727 - RNA, 21 nt, synthetic construct
  source 1..21: mol_type = other RNA
tcccagctcggggacacagga

SEQ ID NO: 728 - RNA, 21 nt, synthetic construct
  source 1..21: mol_type = other RNA
tcccagggccggttaatgtgg

SEQ ID NO: 729 - RNA, 21 nt, synthetic construct
  source 1..21: mol_type = other RNA
tccccgagctgggaccacctt

SEQ ID NO: 730 - RNA, 21 nt, synthetic construct
  source 1..21: mol_type = other RNA
tcccctccaccccacagtggg

SEQ ID NO: 731 - RNA, 21 nt, synthetic construct
  source 1..21: mol_type = other RNA
tccctagtggccccactgtgg

SEQ ID NO: 732 - RNA, 21 nt, synthetic construct
  source 1..21: mol_type = other RNA
tcctagtctcctgatattggg

SEQ ID NO: 733 - RNA, 21 nt, synthetic construct
  source 1..21: mol_type = other RNA
tcctccttcctagtctcctga

SEQ ID NO: 734 - RNA, 21 nt, synthetic construct
  source 1..21: mol_type = other RNA
tcctgatattgggtctaaccc

SEQ ID NO: 735 - RNA, 21 nt, synthetic construct
  source 1..21: mol_type = other RNA
tcctgtccctagtggccccac

SEQ ID NO: 736 - RNA, 21 nt, synthetic construct
  source 1..21: mol_type = other RNA
tcctgtgtccccgagctggga

SEQ ID NO: 737 - RNA, 21 nt, synthetic construct
  source 1..21: mol_type = other RNA
tccttaggcctcctccttcct

SEQ ID NO: 738 - RNA, 21 nt, synthetic construct
  source 1..21: mol_type = other RNA
tccttcctagtctcctgatat

SEQ ID NO: 739 - RNA, 21 nt, synthetic construct
  source 1..21: mol_type = other RNA
tctaacccccacctcctgtta

SEQ ID NO: 740 - RNA, 21 nt, synthetic construct
  source 1..21: mol_type = other RNA
tctcctgatattgggtctaac

SEQ ID NO: 741 - RNA, 21 nt, synthetic construct
  source 1..21: mol_type = other RNA
tctgcctaacaggaggtgggg

SEQ ID NO: 742 - RNA, 21 nt, synthetic construct
  source 1..21: mol_type = other RNA
tctgggtacttttatctgtcc

SEQ ID NO: 743 - RNA, 21 nt, synthetic construct
  source 1..21: mol_type = other RNA
tctggttctgggtacttttat

SEQ ID NO: 744 - RNA, 21 nt, synthetic construct
  source 1..21: mol_type = other RNA
tctgtcaccaatcctgtccct

SEQ ID NO: 745 - RNA, 21 nt, synthetic construct
  source 1..21: mol_type = other RNA
tctgtcccctccaccccacag

SEQ ID NO: 746 - RNA, 21 nt, synthetic construct
  source 1..21: mol_type = other RNA
tgacagaaaagccccatcctt

SEQ ID NO: 747 - RNA, 21 nt, synthetic construct
  source 1..21: mol_type = other RNA
tgatattgggtctaaccccca

SEQ ID NO: 748 - RNA, 21 nt, synthetic construct
  source 1..21: mol_type = other RNA
tgcctaacaggaggtgggggt

SEQ ID NO: 749 - RNA, 21 nt, synthetic construct
  source 1..21: mol_type = other RNA
tgcctccagggatcctgtgtc

SEQ ID NO: 750 - RNA, 21 nt, synthetic construct
  source 1..21: mol_type = other RNA
tggaggggacagataaaagta

SEQ ID NO: 751 - RNA, 21 nt, synthetic construct
  source 1..21: mol_type = other RNA
tggccccactgtggggtggag

SEQ ID NO: 752 - RNA, 21 nt, synthetic construct
  source 1..21: mol_type = other RNA
tggctctggttctgggtactt

SEQ ID NO: 753 - RNA, 21 nt, synthetic construct
  source 1..21: mol_type = other RNA
tgggaatataaggtggtccca

SEQ ID NO: 754 - RNA, 21 nt, synthetic construct
  source 1..21: mol_type = other RNA
tgggaccaccttatattccca

SEQ ID NO: 755 - RNA, 21 nt, synthetic construct
  source 1..21: mol_type = other RNA
tggggccactagggacaggat

SEQ ID NO: 756 - RNA, 21 nt, synthetic construct
  source 1..21: mol_type = other RNA
tggggcttttctgtcaccaat

SEQ ID NO: 757 - RNA, 21 nt, synthetic construct
  source 1..21: mol_type = other RNA
tgggggttagacccaatatca

SEQ ID NO: 758 - RNA, 21 nt, synthetic construct
  source 1..21: mol_type = other RNA
tggggtggaggggacagataa

SEQ ID NO: 759 - RNA, 21 nt, synthetic construct
  source 1..21: mol_type = other RNA
tgggtacttttatctgtcccc

SEQ ID NO: 760 - RNA, 21 nt, synthetic construct
  source 1..21: mol_type = other RNA
tgggtctaacccccacctcct

SEQ ID NO: 761 - RNA, 21 nt, synthetic construct
  source 1..21: mol_type = other RNA
tggtcccagctcggggacaca

SEQ ID NO: 762 - RNA, 21 nt, synthetic construct
  source 1..21: mol_type = other RNA
tggtgacagaaaagccccatc

SEQ ID NO: 763 - RNA, 21 nt, synthetic construct
  source 1..21: mol_type = other RNA
tggttctgggtacttttatct

SEQ ID NO: 764 - RNA, 21 nt, synthetic construct
  source 1..21: mol_type = other RNA
tgtcaccaatcctgtccctag

SEQ ID NO: 765 - RNA, 21 nt, synthetic construct
  source 1..21: mol_type = other RNA
tgtccccgagctgggaccacc

SEQ ID NO: 766 - RNA, 21 nt, synthetic construct
  source 1..21: mol_type = other RNA
tgtcccctccaccccacagtg

SEQ ID NO: 767 - RNA, 21 nt, synthetic construct
  source 1..21: mol_type = other RNA
tgtccctagtggccccactgt

SEQ ID NO: 768 - RNA, 21 nt, synthetic construct
  source 1..21: mol_type = other RNA
tgtggctctggttctgggtac

SEQ ID NO: 769 - RNA, 21 nt, synthetic construct
  source 1..21: mol_type = other RNA
tgtggggtggaggggacagat

SEQ ID NO: 770 - RNA, 21 nt, synthetic construct
  source 1..21: mol_type = other RNA
tgtgtccccgagctgggacca

SEQ ID NO: 771 - RNA, 21 nt, synthetic construct
  source 1..21: mol_type = other RNA
ttaaccggccctgggaatata

SEQ ID NO: 772 - RNA, 21 nt, synthetic construct
  source 1..21: mol_type = other RNA
ttaatgtggctctggttctgg

SEQ ID NO: 773 - RNA, 21 nt, synthetic construct
  source 1..21: mol_type = other RNA
ttagacccaatatcaggagac

SEQ ID NO: 774 - RNA, 21 nt, synthetic construct
  source 1..21: mol_type = other RNA
ttaggcctcctccttcctagt

SEQ ID NO: 775 - RNA, 21 nt, synthetic construct
  source 1..21: mol_type = other RNA
ttatattcccagggccggtta

SEQ ID NO: 776 - RNA, 21 nt, synthetic construct
  source 1..21: mol_type = other RNA
ttatctgtcccctccacccca

SEQ ID NO: 777 - RNA, 21 nt, synthetic construct
  source 1..21: mol_type = other RNA
ttcccagggccggttaatgtg

SEQ ID NO: 778 - RNA, 21 nt, synthetic construct
  source 1..21: mol_type = other RNA
ttcctagtctcctgatattgg

SEQ ID NO: 779 - RNA, 21 nt, synthetic construct
  source 1..21: mol_type = other RNA
ttctgggtacttttatctgtc

SEQ ID NO: 780 - RNA, 21 nt, synthetic construct
  source 1..21: mol_type = other RNA
ttctgtcaccaatcctgtccc

SEQ ID NO: 781 - RNA, 21 nt, synthetic construct
  source 1..21: mol_type = other RNA
ttgggtctaacccccacctcc

SEQ ID NO: 782 - RNA, 21 nt, synthetic construct
  source 1..21: mol_type = other RNA
ttggtgacagaaaagccccat

SEQ ID NO: 783 - RNA, 21 nt, synthetic construct
  source 1..21: mol_type = other RNA
tttatctgtcccctccacccc

SEQ ID NO: 784 - RNA, 21 nt, synthetic construct
  source 1..21: mol_type = other RNA
tttctgtcaccaatcctgtcc

SEQ ID NO: 785 - RNA, 21 nt, synthetic construct
  source 1..21: mol_type = other RNA
ttttatctgtcccctccaccc

SEQ ID NO: 786 - RNA, 21 nt, synthetic construct
  source 1..21: mol_type = other RNA
ttttctgtcaccaatcctgtc

SEQ ID NO: 787 - RNA, 22 nt, synthetic construct
  source 1..22: mol_type = other RNA
aaaagccccatccttaggcctc

SEQ ID NO: 788 - RNA, 22 nt, synthetic construct
  source 1..22: mol_type = other RNA
aaaagtacccagaaccagagcc

SEQ ID NO: 789 - RNA, 22 nt, synthetic construct
  source 1..22: mol_type = other RNA
aaagccccatccttaggcctcc

SEQ ID NO: 790 - RNA, 22 nt, synthetic construct
  source 1..22: mol_type = other RNA
aaagtacccagaaccagagcca

SEQ ID NO: 791 - RNA, 22 nt, synthetic construct
  source 1..22: mol_type = other RNA
aacaggaggtgggggttagacc

SEQ ID NO: 792 - RNA, 22 nt, synthetic construct
  source 1..22: mol_type = other RNA
aaccagagccacattaaccggc

SEQ ID NO: 793 - RNA, 22 nt, synthetic construct
  source 1..22: mol_type = other RNA
aacccccacctcctgttaggca

SEQ ID NO: 794 - RNA, 22 nt, synthetic construct
  source 1..22: mol_type = other RNA
aaccggccctgggaatataagg

SEQ ID NO: 795 - RNA, 22 nt, synthetic construct
  source 1..22: mol_type = other RNA
aagccccatccttaggcctcct

SEQ ID NO: 796 - RNA, 22 nt, synthetic construct
  source 1..22: mol_type = other RNA
aaggaatctgcctaacaggagg

SEQ ID NO: 797 - RNA, 22 nt, synthetic construct
  source 1..22: mol_type = other RNA
aaggaggaggcctaaggatggg

SEQ ID NO: 798 - RNA, 22 nt, synthetic construct
  source 1..22: mol_type = other RNA
aaggatggggcttttctgtcac

SEQ ID NO: 799 - RNA, 22 nt, synthetic construct
  source 1..22: mol_type = other RNA
aaggtggtcccagctcggggac

SEQ ID NO: 800 - RNA, 22 nt, synthetic construct
  source 1..22: mol_type = other RNA
aagtacccagaaccagagccac

SEQ ID NO: 801 - RNA, 22 nt, synthetic construct
  source 1..22: mol_type = other RNA
aatataaggtggtcccagctcg

SEQ ID NO: 802 - RNA, 22 nt, synthetic construct
  source 1..22: mol_type = other RNA
aatatcaggagactaggaagga

SEQ ID NO: 803 - RNA, 22 nt, synthetic construct
  source 1..22: mol_type = other RNA
aatcctgtccctagtggcccca

SEQ ID NO: 804 - RNA, 22 nt, synthetic construct
  source 1..22: mol_type = other RNA
aatctgcctaacaggaggtggg

SEQ ID NO: 805 - RNA, 22 nt, synthetic construct
  source 1..22: mol_type = other RNA
aatgtggctctggttctgggta

SEQ ID NO: 806 - RNA, 22 nt, synthetic construct
  source 1..22: mol_type = other RNA
acagaaaagccccatccttagg

SEQ ID NO: 807 - RNA, 22 nt, synthetic construct
  source 1..22: mol_type = other RNA
acagataaaagtacccagaacc

SEQ ID NO: 808 - RNA, 22 nt, synthetic construct
  source 1..22: mol_type = other RNA
acaggaggtgggggttagaccc

SEQ ID NO: 809 - RNA, 22 nt, synthetic construct
  source 1..22: mol_type = other RNA
acaggattggtgacagaaaagc

SEQ ID NO: 810 - RNA, 22 nt, synthetic construct
  source 1..22: mol_type = other RNA
acagtggggccactagggacag

SEQ ID NO: 811 - RNA, 22 nt, synthetic construct
  source 1..22: mol_type = other RNA
acattaaccggccctgggaata

SEQ ID NO: 812 - RNA, 22 nt, synthetic construct
  source 1..22: mol_type = other RNA
accaatcctgtccctagtggcc

SEQ ID NO: 813 - RNA, 22 nt, synthetic construct
  source 1..22: mol_type = other RNA
accaccttatattcccagggcc

SEQ ID NO: 814 - RNA, 22 nt, synthetic construct
  source 1..22: mol_type = other RNA
accagagccacattaaccggcc

SEQ ID NO: 815 - RNA, 22 nt, synthetic construct
  source 1..22: mol_type = other RNA
acccaatatcaggagactagga

SEQ ID NO: 816 - RNA, 22 nt, synthetic construct
  source 1..22: mol_type = other RNA
acccagaaccagagccacatta

SEQ ID NO: 817 - RNA, 22 nt, synthetic construct
  source 1..22: mol_type = other RNA
accccacagtggggccactagg

SEQ ID NO: 818 - RNA, 22 nt, synthetic construct
  source 1..22: mol_type = other RNA
acccccacctcctgttaggcag

SEQ ID NO: 819 - RNA, 22 nt, synthetic construct
  source 1..22: mol_type = other RNA
accggccctgggaatataaggt

SEQ ID NO: 820 - RNA, 22 nt, synthetic construct
  source 1..22: mol_type = other RNA
accttatattcccagggccggt

SEQ ID NO: 821 - RNA, 22 nt, synthetic construct
  source 1..22: mol_type = other RNA
actaggaaggaggaggcctaag

SEQ ID NO: 822 - RNA, 22 nt, synthetic construct
  source 1..22: mol_type = other RNA
actagggacaggattggtgaca

SEQ ID NO: 823 - RNA, 22 nt, synthetic construct
  source 1..22: mol_type = other RNA
actgtggggtggaggggacaga

SEQ ID NO: 824 - RNA, 22 nt, synthetic construct
  source 1..22: mol_type = other RNA
acttttatctgtcccctccacc

SEQ ID NO: 825 - RNA, 22 nt, synthetic construct
  source 1..22: mol_type = other RNA
agaaaagccccatccttaggcc

SEQ ID NO: 826 - RNA, 22 nt, synthetic construct
  source 1..22: mol_type = other RNA
agaaccagagccacattaaccg

SEQ ID NO: 827 - RNA, 22 nt, synthetic construct
  source 1..22: mol_type = other RNA
agacccaatatcaggagactag

SEQ ID NO: 828 - RNA, 22 nt, synthetic construct
  source 1..22: mol_type = other RNA
agactaggaaggaggaggccta

SEQ ID NO: 829 - RNA, 22 nt, synthetic construct
  source 1..22: mol_type = other RNA
agagccacattaaccggccctg

SEQ ID NO: 830 - RNA, 22 nt, synthetic construct
  source 1..22: mol_type = other RNA
agataaaagtacccagaaccag

SEQ ID NO: 831 - RNA, 22 nt, synthetic construct
  source 1..22: mol_type = other RNA
agataaggaatctgcctaacag

SEQ ID NO: 832 - RNA, 22 nt, synthetic construct
  source 1..22: mol_type = other RNA
agccacattaaccggccctggg

SEQ ID NO: 833 - RNA, 22 nt, synthetic construct
  source 1..22: mol_type = other RNA
agccccatccttaggcctcctc

SEQ ID NO: 834 - RNA, 22 nt, synthetic construct
  source 1..22: mol_type = other RNA
agctcggggacacaggatccct

SEQ ID NO: 835 - RNA, 22 nt, synthetic construct
  source 1..22: mol_type = other RNA
agctgggaccaccttatattcc

SEQ ID NO: 836 - RNA, 22 nt, synthetic construct
  source 1..22: mol_type = other RNA
aggaaggaggaggcctaaggat

SEQ ID NO: 837 - RNA, 22 nt, synthetic construct
  source 1..22: mol_type = other RNA
aggaatctgcctaacaggaggt

SEQ ID NO: 838 - RNA, 22 nt, synthetic construct
  source 1..22: mol_type = other RNA
aggagactaggaaggaggaggc

SEQ ID NO: 839 - RNA, 22 nt, synthetic construct
  source 1..22: mol_type = other RNA
aggaggaggcctaaggatgggg

SEQ ID NO: 840 - RNA, 22 nt, synthetic construct
  source 1..22: mol_type = other RNA
aggaggcctaaggatggggctt

SEQ ID NO: 841 - RNA, 22 nt, synthetic construct
  source 1..22: mol_type = other RNA
aggaggtgggggttagacccaa

SEQ ID NO: 842 - RNA, 22 nt, synthetic construct
  source 1..22: mol_type = other RNA
aggatggggcttttctgtcacc

SEQ ID NO: 843 - RNA, 22 nt, synthetic construct
  source 1..22: mol_type = other RNA
aggattggtgacagaaaagccc

SEQ ID NO: 844 - RNA, 22 nt, synthetic construct
  source 1..22: mol_type = other RNA
aggcctaaggatggggcttttc

SEQ ID NO: 845 - RNA, 22 nt, synthetic construct
  source 1..22: mol_type = other RNA
aggcctcctccttcctagtctc

SEQ ID NO: 846 - RNA, 22 nt, synthetic construct
  source 1..22: mol_type = other RNA
agggacaggattggtgacagaa

SEQ ID NO: 847 - RNA, 22 nt, synthetic construct
  source 1..22: mol_type = other RNA
agggatcctgtgtccccgagct

SEQ ID NO: 848 - RNA, 22 nt, synthetic construct
  source 1..22: mol_type = other RNA
agggccggttaatgtggctctg

SEQ ID NO: 849 - RNA, 22 nt, synthetic construct
  source 1..22: mol_type = other RNA
aggggacagataaaagtaccca

SEQ ID NO: 850 - RNA, 22 nt, synthetic construct
  source 1..22: mol_type = other RNA
aggtgggggttagacccaatat

SEQ ID NO: 851 - RNA, 22 nt, synthetic construct
  source 1..22: mol_type = other RNA
aggtggtcccagctcggggaca

SEQ ID NO: 852 - RNA, 22 nt, synthetic construct
  source 1..22: mol_type = other RNA
agtacccagaaccagagccaca

SEQ ID NO: 853 - RNA, 22 nt, synthetic construct
  source 1..22: mol_type = other RNA
agtctcctgatattgggtctaa

SEQ ID NO: 854 - RNA, 22 nt, synthetic construct
  source 1..22: mol_type = other RNA
agtggccccactgtggggtgga

SEQ ID NO: 855 - RNA, 22 nt, synthetic construct
  source 1..22: mol_type = other RNA
agtggggccactagggacagga

SEQ ID NO: 856 - RNA, 22 nt, synthetic construct
  source 1..22: mol_type = other RNA
ataaaagtacccagaaccagag

SEQ ID NO: 857 - RNA, 22 nt, synthetic construct
  source 1..22: mol_type = other RNA
ataaggaatctgcctaacagga

SEQ ID NO: 858 - RNA, 22 nt, synthetic construct
  source 1..22: mol_type = other RNA
ataaggtggtcccagctcgggg

SEQ ID NO: 859 - RNA, 22 nt, synthetic construct
  source 1..22: mol_type = other RNA
atataaggtggtcccagctcgg

SEQ ID NO: 860 - RNA, 22 nt, synthetic construct
  source 1..22: mol_type = other RNA
atatcaggagactaggaaggag

SEQ ID NO: 861 - RNA, 22 nt, synthetic construct
  source 1..22: mol_type = other RNA
atattcccagggccggttaatg

SEQ ID NO: 862 - RNA, 22 nt, synthetic construct
  source 1..22: mol_type = other RNA
atattgggtctaacccccacct

SEQ ID NO: 863 - RNA, 22 nt, synthetic construct
  source 1..22: mol_type = other RNA
atcaggagactaggaaggagga

SEQ ID NO: 864 - RNA, 22 nt, synthetic construct
  source 1..22: mol_type = other RNA
atcctgtccctagtggccccac

SEQ ID NO: 865 - RNA, 22 nt, synthetic construct
  source 1..22: mol_type = other RNA
atcctgtgtccccgagctggga

SEQ ID NO: 866 - RNA, 22 nt, synthetic construct
  source 1..22: mol_type = other RNA
atccttaggcctcctccttcct

SEQ ID NO: 867 - RNA, 22 nt, synthetic construct
  source 1..22: mol_type = other RNA
atctgcctaacaggaggtgggg

SEQ ID NO: 868 - RNA, 22 nt, synthetic construct
  source 1..22: mol_type = other RNA
atctgtcccctccaccccacag

SEQ ID NO: 869 - RNA, 22 nt, synthetic construct
  source 1..22: mol_type = other RNA
atggggcttttctgtcaccaat

SEQ ID NO: 870 - RNA, 22 nt, synthetic construct
  source 1..22: mol_type = other RNA
atgtggctctggttctgggtac

SEQ ID NO: 871 - RNA, 22 nt, synthetic construct
  source 1..22: mol_type = other RNA
attaaccggccctgggaatata

SEQ ID NO: 872 - RNA, 22 nt, synthetic construct
  source 1..22: mol_type = other RNA
attcccagggccggttaatgtg

SEQ ID NO: 873 - RNA, 22 nt, synthetic construct
  source 1..22: mol_type = other RNA
attgggtctaacccccacctcc

SEQ ID NO: 874 - RNA, 22 nt, synthetic construct
  source 1..22: mol_type = other RNA
attggtgacagaaaagccccat

SEQ ID NO: 875 - RNA, 22 nt, synthetic construct
  source 1..22: mol_type = other RNA
caatatcaggagactaggaagg

SEQ ID NO: 876 - RNA, 22 nt, synthetic construct
  source 1..22: mol_type = other RNA
caatcctgtccctagtggcccc

SEQ ID NO: 877 - RNA, 22 nt, synthetic construct
  source 1..22: mol_type = other RNA
cacagtggggccactagggaca

SEQ ID NO: 878 - RNA, 22 nt, synthetic construct
  source 1..22: mol_type = other RNA
cacattaaccggccctgggaat

SEQ ID NO: 879 - RNA, 22 nt, synthetic construct
  source 1..22: mol_type = other RNA
caccaatcctgtccctagtggc

SEQ ID NO: 880 - RNA, 22 nt, synthetic construct
  source 1..22: mol_type = other RNA
caccccacagtggggccactag

SEQ ID NO: 881 - RNA, 22 nt, synthetic construct
  source 1..22: mol_type = other RNA
caccttatattcccagggccgg

SEQ ID NO: 882 - RNA, 22 nt, synthetic construct
  source 1..22: mol_type = other RNA
cactagggacaggattggtgac

SEQ ID NO: 883 - RNA, 22 nt, synthetic construct
  source 1..22: mol_type = other RNA
cactgtggggtggaggggacag

SEQ ID NO: 884 - RNA, 22 nt, synthetic construct
  source 1..22: mol_type = other RNA
cagaaaagccccatccttaggc

SEQ ID NO: 885 - RNA, 22 nt, synthetic construct
  source 1..22: mol_type = other RNA
cagaaccagagccacattaacc

SEQ ID NO: 886 - RNA, 22 nt, synthetic construct
  source 1..22: mol_type = other RNA
cagagccacattaaccggccct

SEQ ID NO: 887 - RNA, 22 nt, synthetic construct
  source 1..22: mol_type = other RNA
cagataaaagtacccagaacca

SEQ ID NO: 888 - RNA, 22 nt, synthetic construct
  source 1..22: mol_type = other RNA
cagataaggaatctgcctaaca

SEQ ID NO: 889 - RNA, 22 nt, synthetic construct
  source 1..22: mol_type = other RNA
cagctcggggacacaggatccc

SEQ ID NO: 890 - RNA, 22 nt, synthetic construct
  source 1..22: mol_type = other RNA
caggagactaggaaggaggagg

SEQ ID NO: 891 - RNA, 22 nt, synthetic construct
  source 1..22: mol_type = other RNA
caggaggtgggggttagaccca

SEQ ID NO: 892 - RNA, 22 nt, synthetic construct
  source 1..22: mol_type = other RNA
caggattggtgacagaaaagcc

SEQ ID NO: 893 - RNA, 22 nt, synthetic construct
  source 1..22: mol_type = other RNA
cagggatcctgtgtccccgagc

SEQ ID NO: 894 - RNA, 22 nt, synthetic construct
  source 1..22: mol_type = other RNA
cagggccggttaatgtggctct

SEQ ID NO: 895 - RNA, 22 nt, synthetic construct
  source 1..22: mol_type = other RNA
cagtggggccactagggacagg

SEQ ID NO: 896 - RNA, 22 nt, synthetic construct
  source 1..22: mol_type = other RNA
catccttaggcctcctccttcc

SEQ ID NO: 897 - RNA, 22 nt, synthetic construct
  source 1..22: mol_type = other RNA
cattaaccggccctgggaatat

SEQ ID NO: 898 - RNA, 22 nt, synthetic construct
  source 1..22: mol_type = other RNA
ccaatatcaggagactaggaag

SEQ ID NO: 899 - RNA, 22 nt, synthetic construct
  source 1..22: mol_type = other RNA
ccaatcctgtccctagtggccc

SEQ ID NO: 900 - RNA, 22 nt, synthetic construct
  source 1..22: mol_type = other RNA
ccacagtggggccactagggac

SEQ ID NO: 901 - RNA, 22 nt, synthetic construct
  source 1..22: mol_type = other RNA
ccacattaaccggccctgggaa

SEQ ID NO: 902 - RNA, 22 nt, synthetic construct
  source 1..22: mol_type = other RNA
ccaccccacagtggggccacta

SEQ ID NO: 903 - RNA, 22 nt, synthetic construct
  source 1..22: mol_type = other RNA
ccacctcctgttaggcagattc

SEQ ID NO: 904 - RNA, 22 nt, synthetic construct
  source 1..22: mol_type = other RNA
ccaccttatattcccagggccg

SEQ ID NO: 905 - RNA, 22 nt, synthetic construct
  source 1..22: mol_type = other RNA
ccactagggacaggattggtga

SEQ ID NO: 906 - RNA, 22 nt, synthetic construct
  source 1..22: mol_type = other RNA
ccactgtggggtggaggggaca

SEQ ID NO: 907 - RNA, 22 nt, synthetic construct
  source 1..22: mol_type = other RNA
ccagaaccagagccacattaac

SEQ ID NO: 908 - RNA, 22 nt, synthetic construct
  source 1..22: mol_type = other RNA
ccagagccacattaaccggccc

SEQ ID NO: 909 - RNA, 22 nt, synthetic construct
  source 1..22: mol_type = other RNA
ccagctcggggacacaggatcc

SEQ ID NO: 910 - RNA, 22 nt, synthetic construct
  source 1..22: mol_type = other RNA
ccagggatcctgtgtccccgag

SEQ ID NO: 911 - RNA, 22 nt, synthetic construct
  source 1..22: mol_type = other RNA
ccagggccggttaatgtggctc

SEQ ID NO: 912 - RNA, 22 nt, synthetic construct
  source 1..22: mol_type = other RNA
ccatccttaggcctcctccttc

SEQ ID NO: 913 - RNA, 22 nt, synthetic construct
  source 1..22: mol_type = other RNA
cccaatatcaggagactaggaa

SEQ ID NO: 914 - RNA, 22 nt, synthetic construct
  source 1..22: mol_type = other RNA
cccacagtggggccactaggga

SEQ ID NO: 915 - RNA, 22 nt, synthetic construct
  source 1..22: mol_type = other RNA
cccacctcctgttaggcagatt

SEQ ID NO: 916 - RNA, 22 nt, synthetic construct
  source 1..22: mol_type = other RNA
cccactgtggggtggaggggac

SEQ ID NO: 917 - RNA, 22 nt, synthetic construct
  source 1..22: mol_type = other RNA
cccagaaccagagccacattaa

SEQ ID NO: 918 - RNA, 22 nt, synthetic construct
  source 1..22: mol_type = other RNA
cccagctcggggacacaggatc

SEQ ID NO: 919 - RNA, 22 nt, synthetic construct
  source 1..22: mol_type = other RNA
cccagggccggttaatgtggct

SEQ ID NO: 920 - RNA, 22 nt, synthetic construct
  source 1..22: mol_type = other RNA
cccatccttaggcctcctcctt

SEQ ID NO: 921 - RNA, 22 nt, synthetic construct
  source 1..22: mol_type = other RNA
ccccacagtggggccactaggg

SEQ ID NO: 922 - RNA, 22 nt, synthetic construct
  source 1..22: mol_type = other RNA
ccccacctcctgttaggcagat

SEQ ID NO: 923 - RNA, 22 nt, synthetic construct
  source 1..22: mol_type = other RNA
ccccactgtggggtggagggga

SEQ ID NO: 924 - RNA, 22 nt, synthetic construct
  source 1..22: mol_type = other RNA
ccccatccttaggcctcctcct

SEQ ID NO: 925 - RNA, 22 nt, synthetic construct
  source 1..22: mol_type = other RNA
cccccacctcctgttaggcaga

SEQ ID NO: 926 - RNA, 22 nt, synthetic construct
  source 1..22: mol_type = other RNA
ccccgagctgggaccaccttat

SEQ ID NO: 927 - RNA, 22 nt, synthetic construct
  source 1..22: mol_type = other RNA
cccctccaccccacagtggggc

SEQ ID NO: 928 - RNA, 22 nt, synthetic construct
  source 1..22: mol_type = other RNA
cccgagctgggaccaccttata

SEQ ID NO: 929 - RNA, 22 nt, synthetic construct
  source 1..22: mol_type = other RNA
ccctagtggccccactgtgggg

SEQ ID NO: 930 - RNA, 22 nt, synthetic construct
  source 1..22: mol_type = other RNA
ccctccaccccacagtggggcc

SEQ ID NO: 931 - RNA, 22 nt, synthetic construct
  source 1..22: mol_type = other RNA
ccctgggaatataaggtggtcc

SEQ ID NO: 932 - RNA, 22 nt, synthetic construct
  source 1..22: mol_type = other RNA
ccgagctgggaccaccttatat

SEQ ID NO: 933 - RNA, 22 nt, synthetic construct
  source 1..22: mol_type = other RNA
ccggccctgggaatataaggtg

SEQ ID NO: 934 - RNA, 22 nt, synthetic construct
  source 1..22: mol_type = other RNA
ccggttaatgtggctctggttc

SEQ ID NO: 935 - RNA, 22 nt, synthetic construct
  source 1..22: mol_type = other RNA
cctaacaggaggtgggggttag

SEQ ID NO: 936 - RNA, 22 nt, synthetic construct
  source 1..22: mol_type = other RNA
cctaaggatggggcttttctgt

SEQ ID NO: 937 - RNA, 22 nt, synthetic construct
  source 1..22: mol_type = other RNA
cctagtctcctgatattgggtc

SEQ ID NO: 938 - RNA, 22 nt, synthetic construct
  source 1..22: mol_type = other RNA
cctagtggccccactgtggggt

SEQ ID NO: 939 - RNA, 22 nt, synthetic construct
  source 1..22: mol_type = other RNA
cctccaccccacagtggggcca

SEQ ID NO: 940 - RNA, 22 nt, synthetic construct
  source 1..22: mol_type = other RNA
cctccagggatcctgtgtcccc

SEQ ID NO: 941 - RNA, 22 nt, synthetic construct
  source 1..22: mol_type = other RNA
cctcctccttcctagtctcctg

SEQ ID NO: 942 - RNA, 22 nt, synthetic construct
  source 1..22: mol_type = other RNA
cctccttcctagtctcctgata

SEQ ID NO: 943 - RNA, 22 nt, synthetic construct
  source 1..22: mol_type = other RNA
cctgatattgggtctaaccccc

SEQ ID NO: 944 - RNA, 22 nt, synthetic construct
  source 1..22: mol_type = other RNA
cctgggaatataaggtggtccc

SEQ ID NO: 945 - RNA, 22 nt, synthetic construct
  source 1..22: mol_type = other RNA
cctgtccctagtggccccactg

SEQ ID NO: 946 - RNA, 22 nt, synthetic construct
  source 1..22: mol_type = other RNA
cctgtgtccccgagctgggacc

SEQ ID NO: 947 - RNA, 22 nt, synthetic construct
  source 1..22: mol_type = other RNA
ccttaggcctcctccttcctag

SEQ ID NO: 948 - RNA, 22 nt, synthetic construct
  source 1..22: mol_type = other RNA
ccttatattcccagggccggtt

SEQ ID NO: 949 - RNA, 22 nt, synthetic construct
  source 1..22: mol_type = other RNA
ccttcctagtctcctgatattg

SEQ ID NO: 950 - RNA, 22 nt, synthetic construct
  source 1..22: mol_type = other RNA
cgagctgggaccaccttatatt

SEQ ID NO: 951 - RNA, 22 nt, synthetic construct
  source 1..22: mol_type = other RNA
cggccctgggaatataaggtgg

SEQ ID NO: 952 - RNA, 22 nt, synthetic construct
  source 1..22: mol_type = other RNA
cggttaatgtggctctggttct

SEQ ID NO: 953 - RNA, 22 nt, synthetic construct
  source 1..22: mol_type = other RNA
ctaacaggaggtgggggttaga

SEQ ID NO: 954 - RNA, 22 nt, synthetic construct
  source 1..22: mol_type = other RNA
ctaacccccacctcctgttagg

SEQ ID NO: 955 - RNA, 22 nt, synthetic construct
  source 1..22: mol_type = other RNA
ctaaggatggggcttttctgtc

SEQ ID NO: 956 - RNA, 22 nt, synthetic construct
  source 1..22: mol_type = other RNA
ctaggaaggaggaggcctaagg

SEQ ID NO: 957 - RNA, 22 nt, synthetic construct
  source 1..22: mol_type = other RNA
ctagggacaggattggtgacag

SEQ ID NO: 958 - RNA, 22 nt, synthetic construct
  source 1..22: mol_type = other RNA
ctagtctcctgatattgggtct

SEQ ID NO: 959 - RNA, 22 nt, synthetic construct
  source 1..22: mol_type = other RNA
ctagtggccccactgtggggtg

SEQ ID NO: 960 - RNA, 22 nt, synthetic construct
  source 1..22: mol_type = other RNA
ctccaccccacagtggggccac

SEQ ID NO: 961 - RNA, 22 nt, synthetic construct
  source 1..22: mol_type = other RNA
ctccagggatcctgtgtccccg

SEQ ID NO: 962 - RNA, 22 nt, synthetic construct
  source 1..22: mol_type = other RNA
ctcctccttcctagtctcctga

SEQ ID NO: 963 - RNA, 22 nt, synthetic construct
  source 1..22: mol_type = other RNA
ctcctgatattgggtctaaccc

SEQ ID NO: 964 - RNA, 22 nt, synthetic construct
  source 1..22: mol_type = other RNA
ctccttcctagtctcctgatat

SEQ ID NO: 965 - RNA, 22 nt, synthetic construct
  source 1..22: mol_type = other RNA
ctctggttctgggtacttttat

SEQ ID NO: 966 - RNA, 22 nt, synthetic construct
  source 1..22: mol_type = other RNA
ctgatattgggtctaaccccca

SEQ ID NO: 967 - RNA, 22 nt, synthetic construct
  source 1..22: mol_type = other RNA
ctgcctaacaggaggtgggggt

SEQ ID NO: 968 - RNA, 22 nt, synthetic construct
  source 1..22: mol_type = other RNA
ctgcctccagggatcctgtgtc

SEQ ID NO: 969 - RNA, 22 nt, synthetic construct
  source 1..22: mol_type = other RNA
ctgggaatataaggtggtccca

SEQ ID NO: 970 - RNA, 22 nt, synthetic construct
  source 1..22: mol_type = other RNA
ctgggaccaccttatattccca

SEQ ID NO: 971 - RNA, 22 nt, synthetic construct
  source 1..22: mol_type = other RNA
ctgggtacttttatctgtcccc

SEQ ID NO: 972 - RNA, 22 nt, synthetic construct
  source 1..22: mol_type = other RNA
ctggttctgggtacttttatct

SEQ ID NO: 973 - RNA, 22 nt, synthetic construct
  source 1..22: mol_type = other RNA
ctgtcaccaatcctgtccctag

SEQ ID NO: 974 - RNA, 22 nt, synthetic construct
  source 1..22: mol_type = other RNA
ctgtcccctccaccccacagtg

SEQ ID NO: 975 - RNA, 22 nt, synthetic construct
  source 1..22: mol_type = other RNA
ctgtccctagtggccccactgt

SEQ ID NO: 976 - RNA, 22 nt, synthetic construct
  source 1..22: mol_type = other RNA
ctgtggggtggaggggacagat

SEQ ID NO: 977 - RNA, 22 nt, synthetic construct
  source 1..22: mol_type = other RNA
ctgtgtccccgagctgggacca

SEQ ID NO: 978 - RNA, 22 nt, synthetic construct
  source 1..22: mol_type = other RNA
cttaggcctcctccttcctagt

SEQ ID NO: 979 - RNA, 22 nt, synthetic construct
  source 1..22: mol_type = other RNA
cttatattcccagggccggtta

SEQ ID NO: 980 - RNA, 22 nt, synthetic construct
  source 1..22: mol_type = other RNA
cttcctagtctcctgatattgg

SEQ ID NO: 981 - RNA, 22 nt, synthetic construct
  source 1..22: mol_type = other RNA
cttttatctgtcccctccaccc

SEQ ID NO: 982 - RNA, 22 nt, synthetic construct
  source 1..22: mol_type = other RNA
cttttctgtcaccaatcctgtc

SEQ ID NO: 983 - RNA, 22 nt, synthetic construct
  source 1..22: mol_type = other RNA
gaaaagccccatccttaggcct

SEQ ID NO: 984 - RNA, 22 nt, synthetic construct
  source 1..22: mol_type = other RNA
gaaccagagccacattaaccgg

SEQ ID NO: 985 - RNA, 22 nt, synthetic construct
  source 1..22: mol_type = other RNA
gaaggaggaggcctaaggatgg

SEQ ID NO: 986 - RNA, 22 nt, synthetic construct
  source 1..22: mol_type = other RNA
gaatataaggtggtcccagctc

SEQ ID NO: 987 - RNA, 22 nt, synthetic construct
  source 1..22: mol_type = other RNA
gaatctgcctaacaggaggtgg

SEQ ID NO: 988 - RNA, 22 nt, synthetic construct
  source 1..22: mol_type = other RNA
gacagaaaagccccatccttag

SEQ ID NO: 989 - RNA, 22 nt, synthetic construct
  source 1..22: mol_type = other RNA
gacagataaaagtacccagaac

SEQ ID NO: 990 - RNA, 22 nt, synthetic construct
  source 1..22: mol_type = other RNA
gacaggattggtgacagaaaag

SEQ ID NO: 991 - RNA, 22 nt, synthetic construct
  source 1..22: mol_type = other RNA
gaccaccttatattcccagggc

SEQ ID NO: 992 - RNA, 22 nt, synthetic construct
  source 1..22: mol_type = other RNA
gacccaatatcaggagactagg

SEQ ID NO: 993 - RNA, 22 nt, synthetic construct
  source 1..22: mol_type = other RNA
gactaggaaggaggaggcctaa

SEQ ID NO: 994 - RNA, 22 nt, synthetic construct
  source 1..22: mol_type = other RNA
gagactaggaaggaggaggcct

SEQ ID NO: 995 - RNA, 22 nt, synthetic construct
  source 1..22: mol_type = other RNA
gagccacattaaccggccctgg

SEQ ID NO: 996 - RNA, 22 nt, synthetic construct
  source 1..22: mol_type = other RNA
gagctgggaccaccttatattc

SEQ ID NO: 997 - RNA, 22 nt, synthetic construct
  source 1..22: mol_type = other RNA
gaggaggcctaaggatggggct

SEQ ID NO: 998 - RNA, 22 nt, synthetic construct
  source 1..22: mol_type = other RNA
gaggcctaaggatggggctttt

SEQ ID NO: 999 - RNA, 22 nt, synthetic construct
  source 1..22: mol_type = other RNA
gaggggacagataaaagtaccc

SEQ ID NO: 1000 - RNA, 22 nt, synthetic construct
  source 1..22: mol_type = other RNA
gaggtgggggttagacccaata

SEQ ID NO: 1001 - RNA, 22 nt, synthetic construct
  source 1..22: mol_type = other RNA
gataaaagtacccagaaccaga

SEQ ID NO: 1002 - RNA, 22 nt, synthetic construct
  source 1..22: mol_type = other RNA
gataaggaatctgcctaacagg

SEQ ID NO: 1003 - RNA, 22 nt, synthetic construct
  source 1..22: mol_type = other RNA
gatattgggtctaacccccacc

SEQ ID NO: 1004 - RNA, 22 nt, synthetic construct
  source 1..22: mol_type = other RNA
gatcctgtgtccccgagctggg

SEQ ID NO: 1005 - RNA, 22 nt, synthetic construct
  source 1..22: mol_type = other RNA
gatggggcttttctgtcaccaa

SEQ ID NO: 1006 - RNA, 22 nt, synthetic construct
  source 1..22: mol_type = other RNA
gattggtgacagaaaagcccca

SEQ ID NO: 1007 - RNA, 22 nt, synthetic construct
  source 1..22: mol_type = other RNA
gccacattaaccggccctggga

SEQ ID NO: 1008 - RNA, 22 nt, synthetic construct
  source 1..22: mol_type = other RNA
gccactagggacaggattggtg

SEQ ID NO: 1009 - RNA, 22 nt, synthetic construct
  source 1..22: mol_type = other RNA
gccccactgtggggtggagggg

SEQ ID NO: 1010 - RNA, 22 nt, synthetic construct
  source 1..22: mol_type = other RNA
gccccatccttaggcctcctcc

SEQ ID NO: 1011 - RNA, 22 nt, synthetic construct
  source 1..22: mol_type = other RNA
gccctgggaatataaggtggtc

SEQ ID NO: 1012 - RNA, 22 nt, synthetic construct
  source 1..22: mol_type = other RNA
gccggttaatgtggctctggtt

SEQ ID NO: 1013 - RNA, 22 nt, synthetic construct
  source 1..22: mol_type = other RNA
gcctaacaggaggtgggggtta

SEQ ID NO: 1014 - RNA, 22 nt, synthetic construct
  source 1..22: mol_type = other RNA
gcctaaggatggggcttttctg

SEQ ID NO: 1015 - RNA, 22 nt, synthetic construct
  source 1..22: mol_type = other RNA
gcctccagggatcctgtgtccc

SEQ ID NO: 1016 - RNA, 22 nt, synthetic construct
  source 1..22: mol_type = other RNA
gcctcctccttcctagtctcct

SEQ ID NO: 1017 - RNA, 22 nt, synthetic construct
  source 1..22: mol_type = other RNA
gctctggttctgggtactttta

SEQ ID NO: 1018 - RNA, 22 nt, synthetic construct
  source 1..22: mol_type = other RNA
gctgggaccaccttatattccc

SEQ ID NO: 1019 - RNA, 22 nt, synthetic construct
  source 1..22: mol_type = other RNA
gcttttctgtcaccaatcctgt

SEQ ID NO: 1020 - RNA, 22 nt, synthetic construct
  source 1..22: mol_type = other RNA
ggaaggaggaggcctaaggatg

SEQ ID NO: 1021 - RNA, 22 nt, synthetic construct
  source 1..22: mol_type = other RNA
ggaatataaggtggtcccagct

SEQ ID NO: 1022 - RNA, 22 nt, synthetic construct
  source 1..22: mol_type = other RNA
ggaatctgcctaacaggaggtg

SEQ ID NO: 1023 - RNA, 22 nt, synthetic construct
  source 1..22: mol_type = other RNA
ggacagataaaagtacccagaa

SEQ ID NO: 1024 - RNA, 22 nt, synthetic construct
  source 1..22: mol_type = other RNA
ggacaggattggtgacagaaaa

SEQ ID NO: 1025 - RNA, 22 nt, synthetic construct
  source 1..22: mol_type = other RNA
ggaccaccttatattcccaggg

SEQ ID NO: 1026 - RNA, 22 nt, synthetic construct
  source 1..22: mol_type = other RNA
ggagactaggaaggaggaggcc

SEQ ID NO: 1027 - RNA, 22 nt, synthetic construct
  source 1..22: mol_type = other RNA
ggaggaggcctaaggatggggc

SEQ ID NO: 1028 - RNA, 22 nt, synthetic construct
  source 1..22: mol_type = other RNA
ggaggcctaaggatggggcttt

SEQ ID NO: 1029 - RNA, 22 nt, synthetic construct
  source 1..22: mol_type = other RNA
ggaggggacagataaaagtacc

SEQ ID NO: 1030 - RNA, 22 nt, synthetic construct
  source 1..22: mol_type = other RNA
ggaggtgggggttagacccaat

SEQ ID NO: 1031 - RNA, 22 nt, synthetic construct
  source 1..22: mol_type = other RNA
ggatcctgtgtccccgagctgg

SEQ ID NO: 1032 - RNA, 22 nt, synthetic construct
  source 1..22: mol_type = other RNA
ggatggggcttttctgtcacca

SEQ ID NO: 1033 - RNA, 22 nt, synthetic construct
  source 1..22: mol_type = other RNA
ggattggtgacagaaaagcccc

SEQ ID NO: 1034 - RNA, 22 nt, synthetic construct
  source 1..22: mol_type = other RNA
ggccactagggacaggattggt

SEQ ID NO: 1035 - RNA, 22 nt, synthetic construct
  source 1..22: mol_type = other RNA
ggccccactgtggggtggaggg

SEQ ID NO: 1036 - RNA, 22 nt, synthetic construct
  source 1..22: mol_type = other RNA
ggccctgggaatataaggtggt

SEQ ID NO: 1037 - RNA, 22 nt, synthetic construct
  source 1..22: mol_type = other RNA
ggccggttaatgtggctctggt

SEQ ID NO: 1038 - RNA, 22 nt, synthetic construct
  source 1..22: mol_type = other RNA
ggcctaaggatggggcttttct

SEQ ID NO: 1039 - RNA, 22 nt, synthetic construct
  source 1..22: mol_type = other RNA
ggcctcctccttcctagtctcc

SEQ ID NO: 1040 - RNA, 22 nt, synthetic construct
  source 1..22: mol_type = other RNA
ggctctggttctgggtactttt

SEQ ID NO: 1041 - RNA, 22 nt, synthetic construct
  source 1..22: mol_type = other RNA
ggcttttctgtcaccaatcctg

SEQ ID NO: 1042 - RNA, 22 nt, synthetic construct
  source 1..22: mol_type = other RNA
gggaatataaggtggtcccagc

SEQ ID NO: 1043 - RNA, 22 nt, synthetic construct
  source 1..22: mol_type = other RNA
gggacagataaaagtacccaga

SEQ ID NO: 1044 - RNA, 22 nt, synthetic construct
  source 1..22: mol_type = other RNA
gggacaggattggtgacagaaa

SEQ ID NO: 1045 - RNA, 22 nt, synthetic construct
  source 1..22: mol_type = other RNA
gggaccaccttatattcccagg

SEQ ID NO: 1046 - RNA, 22 nt, synthetic construct
  source 1..22: mol_type = other RNA
gggatcctgtgtccccgagctg

SEQ ID NO: 1047 - RNA, 22 nt, synthetic construct
  source 1..22: mol_type = other RNA
gggccactagggacaggattgg

SEQ ID NO: 1048 - RNA, 22 nt, synthetic construct
  source 1..22: mol_type = other RNA
gggccggttaatgtggctctgg

SEQ ID NO: 1049 - RNA, 22 nt, synthetic construct
  source 1..22: mol_type = other RNA
gggcttttctgtcaccaatcct

SEQ ID NO: 1050 - RNA, 22 nt, synthetic construct
  source 1..22: mol_type = other RNA
ggggacagataaaagtacccag

SEQ ID NO: 1051 - RNA, 22 nt, synthetic construct
  source 1..22: mol_type = other RNA
ggggccactagggacaggattg

SEQ ID NO: 1052 - RNA, 22 nt, synthetic construct
  source 1..22: mol_type = other RNA
ggggcttttctgtcaccaatcc

SEQ ID NO: 1053 - RNA, 22 nt, synthetic construct
  source 1..22: mol_type = other RNA
gggggttagacccaatatcagg

SEQ ID NO: 1054 - RNA, 22 nt, synthetic construct
  source 1..22: mol_type = other RNA
ggggtggaggggacagataaaa

SEQ ID NO: 1055 - RNA, 22 nt, synthetic construct
  source 1..22: mol_type = other RNA
ggggttagacccaatatcagga

SEQ ID NO: 1056 - RNA, 22 nt, synthetic construct
  source 1..22: mol_type = other RNA
gggtacttttatctgtcccctc

SEQ ID NO: 1057 - RNA, 22 nt, synthetic construct
  source 1..22: mol_type = other RNA
gggtctaacccccacctcctgt

SEQ ID NO: 1058 - RNA, 22 nt, synthetic construct
  source 1..22: mol_type = other RNA
gggtggaggggacagataaaag

SEQ ID NO: 1059 - RNA, 22 nt, synthetic construct
  source 1..22: mol_type = other RNA
gggttagacccaatatcaggag

SEQ ID NO: 1060 - RNA, 22 nt, synthetic construct
  source 1..22: mol_type = other RNA
ggtacttttatctgtcccctcc

SEQ ID NO: 1061 - RNA, 22 nt, synthetic construct
  source 1..22: mol_type = other RNA
ggtcccagctcggggacacagg

SEQ ID NO: 1062 - RNA, 22 nt, synthetic construct
  source 1..22: mol_type = other RNA
ggtctaacccccacctcctgtt

SEQ ID NO: 1063 - RNA, 22 nt, synthetic construct
  source 1..22: mol_type = other RNA
ggtgacagaaaagccccatcct

SEQ ID NO: 1064 - RNA, 22 nt, synthetic construct
  source 1..22: mol_type = other RNA
ggtggaggggacagataaaagt

SEQ ID NO: 1065 - RNA, 22 nt, synthetic construct
  source 1..22: mol_type = other RNA
ggtgggggttagacccaatatc

SEQ ID NO: 1066 - RNA, 22 nt, synthetic construct
  source 1..22: mol_type = other RNA
ggtggtcccagctcggggacac

SEQ ID NO: 1067 - RNA, 22 nt, synthetic construct
  source 1..22: mol_type = other RNA
ggttaatgtggctctggttctg

SEQ ID NO: 1068 - RNA, 22 nt, synthetic construct
  source 1..22: mol_type = other RNA
ggttagacccaatatcaggaga

SEQ ID NO: 1069 - RNA, 22 nt, synthetic construct
  source 1..22: mol_type = other RNA
ggttctgggtacttttatctgt

SEQ ID NO: 1070 - RNA, 22 nt, synthetic construct
  source 1..22: mol_type = other RNA
gtacccagaaccagagccacat

SEQ ID NO: 1071 - RNA, 22 nt, synthetic construct
  source 1..22: mol_type = other RNA
gtacttttatctgtcccctcca

SEQ ID NO: 1072 - RNA, 22 nt, synthetic construct
  source 1..22: mol_type = other RNA
gtcaccaatcctgtccctagtg

SEQ ID NO: 1073 - RNA, 22 nt, synthetic construct
  source 1..22: mol_type = other RNA
gtcccagctcggggacacagga

SEQ ID NO: 1074 - RNA, 22 nt, synthetic construct
  source 1..22: mol_type = other RNA
gtccccgagctgggaccacctt

SEQ ID NO: 1075 - RNA, 22 nt, synthetic construct
  source 1..22: mol_type = other RNA
gtcccctccaccccacagtggg

SEQ ID NO: 1076 - RNA, 22 nt, synthetic construct
  source 1..22: mol_type = other RNA
gtccctagtggccccactgtgg

SEQ ID NO: 1077 - RNA, 22 nt, synthetic construct
  source 1..22: mol_type = other RNA
gtctaacccccacctcctgtta

SEQ ID NO: 1078 - RNA, 22 nt, synthetic construct
  source 1..22: mol_type = other RNA
gtctcctgatattgggtctaac

SEQ ID NO: 1079 - RNA, 22 nt, synthetic construct
  source 1..22: mol_type = other RNA
gtgacagaaaagccccatcctt

SEQ ID NO: 1080 - RNA, 22 nt, synthetic construct
  source 1..22: mol_type = other RNA
gtggaggggacagataaaagta

SEQ ID NO: 1081 - RNA, 22 nt, synthetic construct
  source 1..22: mol_type = other RNA
gtggccccactgtggggtggag

SEQ ID NO: 1082 - RNA, 22 nt, synthetic construct
  source 1..22: mol_type = other RNA
gtggctctggttctgggtactt

SEQ ID NO: 1083 - RNA, 22 nt, synthetic construct
  source 1..22: mol_type = other RNA
gtggggccactagggacaggat

SEQ ID NO: 1084 - RNA, 22 nt, synthetic construct
  source 1..22: mol_type = other RNA
gtgggggttagacccaatatca

SEQ ID NO: 1085 - RNA, 22 nt, synthetic construct
  source 1..22: mol_type = other RNA
gtggggtggaggggacagataa

SEQ ID NO: 1086 - RNA, 22 nt, synthetic construct
  source 1..22: mol_type = other RNA
gtggtcccagctcggggacaca

SEQ ID NO: 1087 - RNA, 22 nt, synthetic construct
  source 1..22: mol_type = other RNA
gtgtccccgagctgggaccacc

SEQ ID NO: 1088 - RNA, 22 nt, synthetic construct
  source 1..22: mol_type = other RNA
gttaatgtggctctggttctgg

SEQ ID NO: 1089 - RNA, 22 nt, synthetic construct
  source 1..22: mol_type = other RNA
gttagacccaatatcaggagac

SEQ ID NO: 1090 - RNA, 22 nt, synthetic construct
  source 1..22: mol_type = other RNA
gttctgggtacttttatctgtc

SEQ ID NO: 1091 - RNA, 22 nt, synthetic construct
  source 1..22: mol_type = other RNA
taaaagtacccagaaccagagc

SEQ ID NO: 1092 - RNA, 22 nt, synthetic construct
  source 1..22: mol_type = other RNA
taacaggaggtgggggttagac

SEQ ID NO: 1093 - RNA, 22 nt, synthetic construct
  source 1..22: mol_type = other RNA
taacccccacctcctgttaggc

SEQ ID NO: 1094 - RNA, 22 nt, synthetic construct
  source 1..22: mol_type = other RNA
taaccggccctgggaatataag

SEQ ID NO: 1095 - RNA, 22 nt, synthetic construct
  source 1..22: mol_type = other RNA
taaggaatctgcctaacaggag

SEQ ID NO: 1096 - RNA, 22 nt, synthetic construct
  source 1..22: mol_type = other RNA
taaggatggggcttttctgtca

SEQ ID NO: 1097 - RNA, 22 nt, synthetic construct
  source 1..22: mol_type = other RNA
taaggtggtcccagctcgggga

SEQ ID NO: 1098 - RNA, 22 nt, synthetic construct
  source 1..22: mol_type = other RNA
taatgtggctctggttctgggt

SEQ ID NO: 1099 - RNA, 22 nt, synthetic construct
  source 1..22: mol_type = other RNA
tacccagaaccagagccacatt

SEQ ID NO: 1100 - RNA, 22 nt, synthetic construct
  source 1..22: mol_type = other RNA
tacttttatctgtcccctccac

SEQ ID NO: 1101 - RNA, 22 nt, synthetic construct
  source 1..22: mol_type = other RNA
tagacccaatatcaggagacta

SEQ ID NO: 1102 - RNA, 22 nt, synthetic construct
  source 1..22: mol_type = other RNA
taggaaggaggaggcctaagga

SEQ ID NO: 1103 - RNA, 22 nt, synthetic construct
  source 1..22: mol_type = other RNA
taggcctcctccttcctagtct

SEQ ID NO: 1104 - RNA, 22 nt, synthetic construct
  source 1..22: mol_type = other RNA
tagggacaggattggtgacaga

SEQ ID NO: 1105 - RNA, 22 nt, synthetic construct
  source 1..22: mol_type = other RNA
tagtctcctgatattgggtcta

SEQ ID NO: 1106 - RNA, 22 nt, synthetic construct
  source 1..22: mol_type = other RNA
tagtggccccactgtggggtgg

SEQ ID NO: 1107 - RNA, 22 nt, synthetic construct
  source 1..22: mol_type = other RNA
tataaggtggtcccagctcggg

SEQ ID NO: 1108 - RNA, 22 nt, synthetic construct
  source 1..22: mol_type = other RNA
tatattcccagggccggttaat

SEQ ID NO: 1109 - RNA, 22 nt, synthetic construct
  source 1..22: mol_type = other RNA
tatcaggagactaggaaggagg

SEQ ID NO: 1110 - RNA, 22 nt, synthetic construct
  source 1..22: mol_type = other RNA
tatctgtcccctccaccccaca

SEQ ID NO: 1111 - RNA, 22 nt, synthetic construct
  source 1..22: mol_type = other RNA
tattcccagggccggttaatgt

SEQ ID NO: 1112 - RNA, 22 nt, synthetic construct
  source 1..22: mol_type = other RNA
tattgggtctaacccccacctc

SEQ ID NO: 1113 - RNA, 22 nt, synthetic construct
  source 1..22: mol_type = other RNA
tcaccaatcctgtccctagtgg

SEQ ID NO: 1114 - RNA, 22 nt, synthetic construct
  source 1..22: mol_type = other RNA
tcaggagactaggaaggaggag

SEQ ID NO: 1115 - RNA, 22 nt, synthetic construct
  source 1..22: mol_type = other RNA
tccaccccacagtggggccact

SEQ ID NO: 1116 - RNA, 22 nt, synthetic construct
  source 1..22: mol_type = other RNA
tccagggatcctgtgtccccga

SEQ ID NO: 1117 - RNA, 22 nt, synthetic construct
  source 1..22: mol_type = other RNA
tcccagctcggggacacaggat

SEQ ID NO: 1118 - RNA, 22 nt, synthetic construct
  source 1..22: mol_type = other RNA
tcccagggccggttaatgtggc

SEQ ID NO: 1119 - RNA, 22 nt, synthetic construct
  source 1..22: mol_type = other RNA
tccccgagctgggaccacctta

SEQ ID NO: 1120 - RNA, 22 nt, synthetic construct
  source 1..22: mol_type = other RNA
tcccctccaccccacagtgggg

SEQ ID NO: 1121 - RNA, 22 nt, synthetic construct
  source 1..22: mol_type = other RNA
tccctagtggccccactgtggg

SEQ ID NO: 1122 - RNA, 22 nt, synthetic construct
  source 1..22: mol_type = other RNA
tcctagtctcctgatattgggt

SEQ ID NO: 1123 - RNA, 22 nt, synthetic construct
  source 1..22: mol_type = other RNA
tcctccttcctagtctcctgat

SEQ ID NO: 1124 - RNA, 22 nt, synthetic construct
  source 1..22: mol_type = other RNA
tcctgatattgggtctaacccc

SEQ ID NO: 1125 - RNA, 22 nt, synthetic construct
  source 1..22: mol_type = other RNA
tcctgtccctagtggccccact

SEQ ID NO: 1126 - RNA, 22 nt, synthetic construct
  source 1..22: mol_type = other RNA
tcctgtgtccccgagctgggac

SEQ ID NO: 1127 - RNA, 22 nt, synthetic construct
  source 1..22: mol_type = other RNA
tccttaggcctcctccttccta

SEQ ID NO: 1128 - RNA, 22 nt, synthetic construct
  source 1..22: mol_type = other RNA
tccttcctagtctcctgatatt

SEQ ID NO: 1129 - RNA, 22 nt, synthetic construct
  source 1..22: mol_type = other RNA
tctaacccccacctcctgttag

SEQ ID NO: 1130 - RNA, 22 nt, synthetic construct
  source 1..22: mol_type = other RNA
tctcctgatattgggtctaacc

SEQ ID NO: 1131 - RNA, 22 nt, synthetic construct
  source 1..22: mol_type = other RNA
tctgcctaacaggaggtggggg

SEQ ID NO: 1132 - RNA, 22 nt, synthetic construct
  source 1..22: mol_type = other RNA
tctgggtacttttatctgtccc

SEQ ID NO: 1133 - RNA, 22 nt, synthetic construct
  source 1..22: mol_type = other RNA
tctggttctgggtacttttatc

SEQ ID NO: 1134 - RNA, 22 nt, synthetic construct
  source 1..22: mol_type = other RNA
tctgtcaccaatcctgtcccta

SEQ ID NO: 1135 - RNA, 22 nt, synthetic construct
  source 1..22: mol_type = other RNA
tctgtcccctccaccccacagt

SEQ ID NO: 1136 - RNA, 22 nt, synthetic construct
  source 1..22: mol_type = other RNA
tgacagaaaagccccatcctta

SEQ ID NO: 1137 - RNA, 22 nt, synthetic construct
  source 1..22: mol_type = other RNA
tgatattgggtctaacccccac

SEQ ID NO: 1138 - RNA, 22 nt, synthetic construct
  source 1..22: mol_type = other RNA
tgcctaacaggaggtgggggtt

SEQ ID NO: 1139 - RNA, 22 nt, synthetic construct
  source 1..22: mol_type = other RNA
tgcctccagggatcctgtgtcc

SEQ ID NO: 1140 - RNA, 22 nt, synthetic construct
  source 1..22: mol_type = other RNA
tggaggggacagataaaagtac

SEQ ID NO: 1141 - RNA, 22 nt, synthetic construct
  source 1..22: mol_type = other RNA
tggccccactgtggggtggagg

SEQ ID NO: 1142 - RNA, 22 nt, synthetic construct
  source 1..22: mol_type = other RNA
tggctctggttctgggtacttt

SEQ ID NO: 1143 - RNA, 22 nt, synthetic construct
  source 1..22: mol_type = other RNA
tgggaatataaggtggtcccag

SEQ ID NO: 1144 - RNA, 22 nt, synthetic construct
  source 1..22: mol_type = other RNA
tgggaccaccttatattcccag

SEQ ID NO: 1145 - RNA, 22 nt, synthetic construct
  source 1..22: mol_type = other RNA
tggggccactagggacaggatt

SEQ ID NO: 1146 - RNA, 22 nt, synthetic construct
  source 1..22: mol_type = other RNA
tggggcttttctgtcaccaatc

SEQ ID NO: 1147 - RNA, 22 nt, synthetic construct
  source 1..22: mol_type = other RNA
tgggggttagacccaatatcag

SEQ ID NO: 1148 - RNA, 22 nt, synthetic construct
  source 1..22: mol_type = other RNA
tggggtggaggggacagataaa

SEQ ID NO: 1149 - RNA, 22 nt, synthetic construct
  source 1..22: mol_type = other RNA
tgggtacttttatctgtcccct

SEQ ID NO: 1150 - RNA, 22 nt, synthetic construct
  source 1..22: mol_type = other RNA
tgggtctaacccccacctcctg

SEQ ID NO: 1151 - RNA, 22 nt, synthetic construct
  source 1..22: mol_type = other RNA
tggtcccagctcggggacacag

SEQ ID NO: 1152 - RNA, 22 nt, synthetic construct
  source 1..22: mol_type = other RNA
tggtgacagaaaagccccatcc

SEQ ID NO: 1153 - RNA, 22 nt, synthetic construct
  source 1..22: mol_type = other RNA
tggttctgggtacttttatctg

SEQ ID NO: 1154 - RNA, 22 nt, synthetic construct
  source 1..22: mol_type = other RNA
tgtcaccaatcctgtccctagt

SEQ ID NO: 1155 - RNA, 22 nt, synthetic construct
  source 1..22: mol_type = other RNA
tgtccccgagctgggaccacct

SEQ ID NO: 1156 - RNA, 22 nt, synthetic construct
  source 1..22: mol_type = other RNA
tgtcccctccaccccacagtgg

SEQ ID NO: 1157 - RNA, 22 nt, synthetic construct
  source 1..22: mol_type = other RNA
tgtccctagtggccccactgtg

SEQ ID NO: 1158 - RNA, 22 nt, synthetic construct
  source 1..22: mol_type = other RNA
tgtggctctggttctgggtact

SEQ ID NO: 1159 - RNA, 22 nt, synthetic construct
  source 1..22: mol_type = other RNA
tgtggggtggaggggacagata

SEQ ID NO: 1160 - RNA, 22 nt, synthetic construct
  source 1..22: mol_type = other RNA
tgtgtccccgagctgggaccac

SEQ ID NO: 1161 - RNA, 22 nt, synthetic construct
  source 1..22: mol_type = other RNA
ttaaccggccctgggaatataa

SEQ ID NO: 1162 - RNA, 22 nt, synthetic construct
  source 1..22: mol_type = other RNA
ttaatgtggctctggttctggg

SEQ ID NO: 1163 - RNA, 22 nt, synthetic construct
  source 1..22: mol_type = other RNA
ttagacccaatatcaggagact

SEQ ID NO: 1164 - RNA, 22 nt, synthetic construct
  source 1..22: mol_type = other RNA
ttaggcctcctccttcctagtc

SEQ ID NO: 1165 - RNA, 22 nt, synthetic construct
  source 1..22: mol_type = other RNA
ttatattcccagggccggttaa

SEQ ID NO: 1166 - RNA, 22 nt, synthetic construct
  source 1..22: mol_type = other RNA
ttatctgtcccctccaccccac

SEQ ID NO: 1167 - RNA, 22 nt, synthetic construct
  source 1..22: mol_type = other RNA
ttcccagggccggttaatgtgg

SEQ ID NO: 1168 - RNA, 22 nt, synthetic construct
  source 1..22: mol_type = other RNA
ttcctagtctcctgatattggg

SEQ ID NO: 1169 - RNA, 22 nt, synthetic construct
  source 1..22: mol_type = other RNA
ttctgggtacttttatctgtcc

SEQ ID NO: 1170 - RNA, 22 nt, synthetic construct
  source 1..22: mol_type = other RNA
ttctgtcaccaatcctgtccct

SEQ ID NO: 1171 - RNA, 22 nt, synthetic construct
  source 1..22: mol_type = other RNA
ttgggtctaacccccacctcct

SEQ ID NO: 1172 - RNA, 22 nt, synthetic construct
  source 1..22: mol_type = other RNA
ttggtgacagaaaagccccatc

SEQ ID NO: 1173 - RNA, 22 nt, synthetic construct
  source 1..22: mol_type = other RNA
tttatctgtcccctccacccca

SEQ ID NO: 1174 - RNA, 22 nt, synthetic construct
  source 1..22: mol_type = other RNA
tttctgtcaccaatcctgtccc

SEQ ID NO: 1175 - RNA, 22 nt, synthetic construct
  source 1..22: mol_type = other RNA
ttttatctgtcccctccacccc

SEQ ID NO: 1176 - RNA, 22 nt, synthetic construct
  source 1..22: mol_type = other RNA
ttttctgtcaccaatcctgtcc

SEQ ID NO: 1177 - RNA, 20 nt, synthetic construct
  source 1..20: mol_type = other RNA
aaaaacggtgatgatgcagg

SEQ ID NO: 1178 - RNA, 20 nt, synthetic construct
  source 1..20: mol_type = other RNA
aaaacggtgatgatgcaggc

SEQ ID NO: 1179 - RNA, 20 nt, synthetic construct
  source 1..20: mol_type = other RNA
aaaagggaacccagcgagtg

SEQ ID NO: 1180 - RNA, 20 nt, synthetic construct
  source 1..20: mol_type = other RNA
aaacagtgggccagaggcgg

SEQ ID NO: 1181 - RNA, 20 nt, synthetic construct
  source 1..20: mol_type = other RNA
aaacgagagatggcacaggc

SEQ ID NO: 1182 - RNA, 20 nt, synthetic construct
  source 1..20: mol_type = other RNA
aaacggtgatgatgcaggcc

SEQ ID NO: 1183 - RNA, 20 nt, synthetic construct
  source 1..20: mol_type = other RNA
aaagaaagcaagaggatgga

SEQ ID NO: 1184 - RNA, 20 nt, synthetic construct
  source 1..20: mol_type = other RNA
aaagagcatccttgggcagc

SEQ ID NO: 1185 - RNA, 20 nt, synthetic construct
  source 1..20: mol_type = other RNA
aaagcaagaggatggagagg

SEQ ID NO: 1186 - RNA, 20 nt, synthetic construct
  source 1..20: mol_type = other RNA
aaagcaggacctgcctggga

SEQ ID NO: 1187 - RNA, 20 nt, synthetic construct
  source 1..20: mol_type = other RNA
aaagccagggagacggggta

SEQ ID NO: 1188 - RNA, 20 nt, synthetic construct
  source 1..20: mol_type = other RNA
aaagccagggccagttaaag

SEQ ID NO: 1189 - RNA, 20 nt, synthetic construct
  source 1..20: mol_type = other RNA
aaagcccagggccaggaacg

SEQ ID NO: 1190 - RNA, 20 nt, synthetic construct
  source 1..20: mol_type = other RNA
aaagcgactccaatgcggaa

SEQ ID NO: 1191 - RNA, 20 nt, synthetic construct
  source 1..20: mol_type = other RNA
aaagcggcacaggcccaggg

SEQ ID NO: 1192 - RNA, 20 nt, synthetic construct
  source 1..20: mol_type = other RNA
aaaggagtgagaggtgaccc

SEQ ID NO: 1193 - RNA, 20 nt, synthetic construct
  source 1..20: mol_type = other RNA
aaagggaacccagcgagtga

SEQ ID NO: 1194 - RNA, 20 nt, synthetic construct
  source 1..20: mol_type = other RNA
aaagtaccccgtctccctgg

SEQ ID NO: 1195 - RNA, 20 nt, synthetic construct
  source 1..20: mol_type = other RNA
aaagtccaggaccggctgga

SEQ ID NO: 1196 - RNA, 20 nt, synthetic construct
  source 1..20: mol_type = other RNA
aaagtgacaatggccagggc

SEQ ID NO: 1197 - RNA, 20 nt, synthetic construct
  source 1..20: mol_type = other RNA
aaagtggtccggactcagga

SEQ ID NO: 1198 - RNA, 20 nt, synthetic construct
  source 1..20: mol_type = other RNA
aaatgaaaggagtgagaggt

SEQ ID NO: 1199 - RNA, 20 nt, synthetic construct
  source 1..20: mol_type = other RNA
aacacagcagagagcaaggg

SEQ ID NO: 1200 - RNA, 20 nt, synthetic construct
  source 1..20: mol_type = other RNA
aacagtgggccagaggcggc

SEQ ID NO: 1201 - RNA, 20 nt, synthetic construct
  source 1..20: mol_type = other RNA
aacatcggaagaggggaagt

SEQ ID NO: 1202 - RNA, 20 nt, synthetic construct
  source 1..20: mol_type = other RNA
aacccagcgagtgaagacgg

SEQ ID NO: 1203 - RNA, 20 nt, synthetic construct
  source 1..20: mol_type = other RNA
aaccccaaagtaccccgtct

SEQ ID NO: 1204 - RNA, 20 nt, synthetic construct
  source 1..20: mol_type = other RNA
aaccccatgccgtcttcact

SEQ ID NO: 1205 - RNA, 20 nt, synthetic construct
  source 1..20: mol_type = other RNA
aacctgaaggaggcggcagg

SEQ ID NO: 1206 - RNA, 20 nt, synthetic construct
  source 1..20: mol_type = other RNA
aacctgagccagctcccata

SEQ ID NO: 1207 - RNA, 20 nt, synthetic construct
  source 1..20: mol_type = other RNA
aacgagagatggcacaggcc

SEQ ID NO: 1208 - RNA, 20 nt, synthetic construct
  source 1..20: mol_type = other RNA
aacgctgccgtctctctcct

SEQ ID NO: 1209 - RNA, 20 nt, synthetic construct
  source 1..20: mol_type = other RNA
aacggggtgtccaggcaaag

SEQ ID NO: 1210 - RNA, 20 nt, synthetic construct
  source 1..20: mol_type = other RNA
aacggtgatgatgcaggcct

SEQ ID NO: 1211 - RNA, 20 nt, synthetic construct
  source 1..20: mol_type = other RNA
aactctgccctctaacgctg

SEQ ID NO: 1212 - RNA, 20 nt, synthetic construct
  source 1..20: mol_type = other RNA
aactggccctggctttggca

SEQ ID NO: 1213 - RNA, 20 nt, synthetic construct
  source 1..20: mol_type = other RNA
aactggccctgggcttagcc

SEQ ID NO: 1214 - RNA, 20 nt, synthetic construct
  source 1..20: mol_type = other RNA
aagaaacgagagatggcaca

SEQ ID NO: 1215 - RNA, 20 nt, synthetic construct
  source 1..20: mol_type = other RNA
aagaaagcaagaggatggag

SEQ ID NO: 1216 - RNA, 20 nt, synthetic construct
  source 1..20: mol_type = other RNA
aagaaggggaggcgggacgc

SEQ ID NO: 1217 - RNA, 20 nt, synthetic construct
  source 1..20: mol_type = other RNA
aagacggaacctgaaggagg

SEQ ID NO: 1218 - RNA, 20 nt, synthetic construct
  source 1..20: mol_type = other RNA
aagacggcatggggttgggt

SEQ ID NO: 1219 - RNA, 20 nt, synthetic construct
  source 1..20: mol_type = other RNA
aagagagtaggtcgaagggg

SEQ ID NO: 1220 - RNA, 20 nt, synthetic construct
  source 1..20: mol_type = other RNA
aagagcatccttgggcagca

SEQ ID NO: 1221 - RNA, 20 nt, synthetic construct
  source 1..20: mol_type = other RNA
aagaggatggagaggtggct

SEQ ID NO: 1222 - RNA, 20 nt, synthetic construct
  source 1..20: mol_type = other RNA
aagagggagtggaggaagac

SEQ ID NO: 1223 - RNA, 20 nt, synthetic construct
  source 1..20: mol_type = other RNA
aagaggggaagtcgagggag

SEQ ID NO: 1224 - RNA, 20 nt, synthetic construct
  source 1..20: mol_type = other RNA
aagcaagaggatggagaggt

SEQ ID NO: 1225 - RNA, 20 nt, synthetic construct
  source 1..20: mol_type = other RNA
aagcaggacctgcctgggaa

SEQ ID NO: 1226 - RNA, 20 nt, synthetic construct
  source 1..20: mol_type = other RNA
aagccagggagacggggtac

SEQ ID NO: 1227 - RNA, 20 nt, synthetic construct
  source 1..20: mol_type = other RNA
aagccagggccagttaaagc

SEQ ID NO: 1228 - RNA, 20 nt, synthetic construct
  source 1..20: mol_type = other RNA
aagccagtagagctcaaagt

SEQ ID NO: 1229 - RNA, 20 nt, synthetic construct
  source 1..20: mol_type = other RNA
aagcccagggccagttgaag

SEQ ID NO: 1230 - RNA, 20 nt, synthetic construct
  source 1..20: mol_type = other RNA
aagcgactccaatgcggaag

SEQ ID NO: 1231 - RNA, 20 nt, synthetic construct
  source 1..20: mol_type = other RNA
aagcggcacaggcccagggg

SEQ ID NO: 1232 - RNA, 20 nt, synthetic construct
  source 1..20: mol_type = other RNA
aagcggctccaattcggaag

SEQ ID NO: 1233 - RNA, 20 nt, synthetic construct
  source 1..20: mol_type = other RNA
aagctgcagacagaaagcgg

SEQ ID NO: 1234 - RNA, 20 nt, synthetic construct
  source 1..20: mol_type = other RNA
aaggaaaagggaacccagcg

SEQ ID NO: 1235 - RNA, 20 nt, synthetic construct
  source 1..20: mol_type = other RNA
aaggaagtgctccggaaaga

SEQ ID NO: 1236 - RNA, 20 nt, synthetic construct
  source 1..20: mol_type = other RNA
aaggagaaggaaaagggaac

SEQ ID NO: 1237 - RNA, 20 nt, synthetic construct
  source 1..20: mol_type = other RNA
aaggagacaaagtccaggac

SEQ ID NO: 1238 - RNA, 20 nt, synthetic construct
  source 1..20: mol_type = other RNA
aaggaggactgcatgggtca

SEQ ID NO: 1239 - RNA, 20 nt, synthetic construct
  source 1..20: mol_type = other RNA
aaggaggcctggggcagagt

SEQ ID NO: 1240 - RNA, 20 nt, synthetic construct
  source 1..20: mol_type = other RNA
aaggaggcggcagggaagga

SEQ ID NO: 1241 - RNA, 20 nt, synthetic construct
  source 1..20: mol_type = other RNA
aaggagtgagaggtgacccg

SEQ ID NO: 1242 - RNA, 20 nt, synthetic construct
  source 1..20: mol_type = other RNA
aaggatctgggccagccgta

SEQ ID NO: 1243 - RNA, 20 nt, synthetic construct
  source 1..20: mol_type = other RNA
aaggatgctctttccggagc

SEQ ID NO: 1244 - RNA, 20 nt, synthetic construct
  source 1..20: mol_type = other RNA
aaggccatcctaagaaacga

SEQ ID NO: 1245 - RNA, 20 nt, synthetic construct
  source 1..20: mol_type = other RNA
aagggaacccagcgagtgaa

SEQ ID NO: 1246 - RNA, 20 nt, synthetic construct
  source 1..20: mol_type = other RNA
aagggagacatccgtcggag

SEQ ID NO: 1247 - RNA, 20 nt, synthetic construct
  source 1..20: mol_type = other RNA
aagggcactcgggggcgaga

SEQ ID NO: 1248 - RNA, 20 nt, synthetic construct
  source 1..20: mol_type = other RNA
aaggggaaacagtgggccag

SEQ ID NO: 1249 - RNA, 20 nt, synthetic construct
  source 1..20: mol_type = other RNA
aaggggaagagggagtggag

SEQ ID NO: 1250 - RNA, 20 nt, synthetic construct
  source 1..20: mol_type = other RNA
aaggggaatggtaaggaggc

SEQ ID NO: 1251 - RNA, 20 nt, synthetic construct
  source 1..20: mol_type = other RNA
aaggggaatggtaaggggga

SEQ ID NO: 1252 - RNA, 20 nt, synthetic construct
  source 1..20: mol_type = other RNA
aaggggaggcgggacgcaag

SEQ ID NO: 1253 - RNA, 20 nt, synthetic construct
  source 1..20: mol_type = other RNA
aagggggactgggacggggt

SEQ ID NO: 1254 - RNA, 20 nt, synthetic construct
  source 1..20: mol_type = other RNA
aaggggggtaggggagctgc

SEQ ID NO: 1255 - RNA, 20 nt, synthetic construct
  source 1..20: mol_type = other RNA
aagtaccccgtctccctggc

SEQ ID NO: 1256 - RNA, 20 nt, synthetic construct
  source 1..20: mol_type = other RNA
aagtccaggaccggctggag

SEQ ID NO: 1257 - RNA, 20 nt, synthetic construct
  source 1..20: mol_type = other RNA
aagtcgagggagggatggta

SEQ ID NO: 1258 - RNA, 20 nt, synthetic construct
  source 1..20: mol_type = other RNA
aagtgacaatggccagggcc

SEQ ID NO: 1259 - RNA, 20 nt, synthetic construct
  source 1..20: mol_type = other RNA
aagtgctccggaaagagcat

SEQ ID NO: 1260 - RNA, 20 nt, synthetic construct
  source 1..20: mol_type = other RNA
aagtggggtggtcgaagggg

SEQ ID NO: 1261 - RNA, 20 nt, synthetic construct
  source 1..20: mol_type = other RNA
aagtggtccggactcaggag

SEQ ID NO: 1262 - RNA, 20 nt, synthetic construct
  source 1..20: mol_type = other RNA
aatccacaggagaacggggt

SEQ ID NO: 1263 - RNA, 20 nt, synthetic construct
  source 1..20: mol_type = other RNA
aatgaaaggagtgagaggtg

SEQ ID NO: 1264 - RNA, 20 nt, synthetic construct
  source 1..20: mol_type = other RNA
aatgcaggtcagagaaagca

SEQ ID NO: 1265 - RNA, 20 nt, synthetic construct
  source 1..20: mol_type = other RNA
aatgcggaagagagtaggtc

SEQ ID NO: 1266 - RNA, 20 nt, synthetic construct
  source 1..20: mol_type = other RNA
aatggccagggccaggcaga

SEQ ID NO: 1267 - RNA, 20 nt, synthetic construct
  source 1..20: mol_type = other RNA
aatggtaaggaggcctgggg

SEQ ID NO: 1268 - RNA, 20 nt, synthetic construct
  source 1..20: mol_type = other RNA
aatggtaagggggactggga

SEQ ID NO: 1269 - RNA, 20 nt, synthetic construct
  source 1..20: mol_type = other RNA
aattcggaagtggggtggtc

SEQ ID NO: 1270 - RNA, 20 nt, synthetic construct
  source 1..20: mol_type = other RNA
aattggagccgcttcaactg

SEQ ID NO: 1271 - RNA, 20 nt, synthetic construct
  source 1..20: mol_type = other RNA
acaaagtccaggaccggctg

SEQ ID NO: 1272 - RNA, 20 nt, synthetic construct
  source 1..20: mol_type = other RNA
acaaccccaaagtaccccgt

SEQ ID NO: 1273 - RNA, 20 nt, synthetic construct
  source 1..20: mol_type = other RNA
acaagaaggggaggcgggac

SEQ ID NO: 1274 - RNA, 20 nt, synthetic construct
  source 1..20: mol_type = other RNA
acaagctgcagacagaaagc

SEQ ID NO: 1275 - RNA, 20 nt, synthetic construct
  source 1..20: mol_type = other RNA
acaatggccagggccaggca

SEQ ID NO: 1276 - RNA, 20 nt, synthetic construct
  source 1..20: mol_type = other RNA
acacagcagagagcaagggg

SEQ ID NO: 1277 - RNA, 20 nt, synthetic construct
  source 1..20: mol_type = other RNA
acaccccgtcccagtccccc

SEQ ID NO: 1278 - RNA, 20 nt, synthetic construct
  source 1..20: mol_type = other RNA
acaccccgttctcctgtgga

SEQ ID NO: 1279 - RNA, 20 nt, synthetic construct
  source 1..20: mol_type = other RNA
acacggggaggatccgctca

SEQ ID NO: 1280 - RNA, 20 nt, synthetic construct
  source 1..20: mol_type = other RNA
acagaaagcggcacaggccc

SEQ ID NO: 1281 - RNA, 20 nt, synthetic construct
  source 1..20: mol_type = other RNA
acagactagagaggtaaggg

SEQ ID NO: 1282 - RNA, 20 nt, synthetic construct
  source 1..20: mol_type = other RNA
acagagtggctaagcccagg

SEQ ID NO: 1283 - RNA, 20 nt, synthetic construct
  source 1..20: mol_type = other RNA
acagcaagggcactcggggg

SEQ ID NO: 1284 - RNA, 20 nt, synthetic construct
  source 1..20: mol_type = other RNA
acagcagagagcaaggggaa

SEQ ID NO: 1285 - RNA, 20 nt, synthetic construct
  source 1..20: mol_type = other RNA
acaggagaacggggtgtcca

SEQ ID NO: 1286 - RNA, 20 nt, synthetic construct
  source 1..20: mol_type = other RNA
acaggcccaggggagagaat

SEQ ID NO: 1287 - RNA, 20 nt, synthetic construct
  source 1..20: mol_type = other RNA
acaggccccagaaggagaag

SEQ ID NO: 1288 - RNA, 20 nt, synthetic construct
  source 1..20: mol_type = other RNA
acaggctgccaaagccaggg

SEQ ID NO: 1289 - RNA, 20 nt, synthetic construct
  source 1..20: mol_type = other RNA
acagtgggccagaggcggcg

SEQ ID NO: 1290 - RNA, 20 nt, synthetic construct
  source 1..20: mol_type = other RNA
acatcacgtggtgcagcgcc

SEQ ID NO: 1291 - RNA, 20 nt, synthetic construct
  source 1..20: mol_type = other RNA
acatccgtcggagaaggcca

SEQ ID NO: 1292 - RNA, 20 nt, synthetic construct
  source 1..20: mol_type = other RNA
acatcggaagaggggaagtc

SEQ ID NO: 1293 - RNA, 20 nt, synthetic construct
  source 1..20: mol_type = other RNA
accaccccacttccgaattg

SEQ ID NO: 1294 - RNA, 20 nt, synthetic construct
  source 1..20: mol_type = other RNA
accacgtgatgtcctctgag

SEQ ID NO: 1295 - RNA, 20 nt, synthetic construct
  source 1..20: mol_type = other RNA
accactctgccccaggcctc

SEQ ID NO: 1296 - RNA, 20 nt, synthetic construct
  source 1..20: mol_type = other RNA
accactttgagctctactgg

SEQ ID NO: 1297 - RNA, 20 nt, synthetic construct
  source 1..20: mol_type = other RNA
accagactgagctatgggag

SEQ ID NO: 1298 - RNA, 20 nt, synthetic construct
  source 1..20: mol_type = other RNA
accatccctccctcgacttc

SEQ ID NO: 1299 - RNA, 20 nt, synthetic construct
  source 1..20: mol_type = other RNA
accattccccttcgaccacc

SEQ ID NO: 1300 - RNA, 20 nt, synthetic construct
  source 1..20: mol_type = other RNA
accattccccttcgacctac

SEQ ID NO: 1301 - RNA, 20 nt, synthetic construct
  source 1..20: mol_type = other RNA
acccaaccccatgccgtctt

SEQ ID NO: 1302 - RNA, 20 nt, synthetic construct
  source 1..20: mol_type = other RNA
acccagacacggggaggatc

SEQ ID NO: 1303 - RNA, 20 nt, synthetic construct
  source 1..20: mol_type = other RNA
acccagcgagtgaagacggc

SEQ ID NO: 1304 - RNA, 20 nt, synthetic construct
  source 1..20: mol_type = other RNA
acccaggccacaagctgcag

SEQ ID NO: 1305 - RNA, 20 nt, synthetic construct
  source 1..20: mol_type = other RNA
acccatgcagtcctccttac

SEQ ID NO: 1306 - RNA, 20 nt, synthetic construct
  source 1..20: mol_type = other RNA
accccaaagtaccccgtctc

SEQ ID NO: 1307 - RNA, 20 nt, synthetic construct
  source 1..20: mol_type = other RNA
accccacttccgaattggag

SEQ ID NO: 1308 - RNA, 20 nt, synthetic construct
  source 1..20: mol_type = other RNA
accccatgccgtcttcactc

SEQ ID NO: 1309 - RNA, 20 nt, synthetic construct
  source 1..20: mol_type = other RNA
accccccttacctctctagt

SEQ ID NO: 1310 - RNA, 20 nt, synthetic construct
  source 1..20: mol_type = other RNA
accccgtcccagtccccctt

SEQ ID NO: 1311 - RNA, 20 nt, synthetic construct
  source 1..20: mol_type = other RNA
accccgtctccctggcttta

SEQ ID NO: 1312 - RNA, 20 nt, synthetic construct
  source 1..20: mol_type = other RNA
accccgttctcctgtggatt

SEQ ID NO: 1313 - RNA, 20 nt, synthetic construct
  source 1..20: mol_type = other RNA
acccgaatccacaggagaac

SEQ ID NO: 1314 - RNA, 20 nt, synthetic construct
  source 1..20: mol_type = other RNA
accctatgctgacaccccgt

SEQ ID NO: 1315 - RNA, 20 nt, synthetic construct
  source 1..20: mol_type = other RNA
accggctggaggggctcaac

SEQ ID NO: 1316 - RNA, 20 nt, synthetic construct
  source 1..20: mol_type = other RNA
accgtttttctggacaaccc

SEQ ID NO: 1317 - RNA, 20 nt, synthetic construct
  source 1..20: mol_type = other RNA
acctactctcttccgcattg

SEQ ID NO: 1318 - RNA, 20 nt, synthetic construct
  source 1..20: mol_type = other RNA
acctctacggctggcccaga

SEQ ID NO: 1319 - RNA, 20 nt, synthetic construct
  source 1..20: mol_type = other RNA
acctctcactcctttcattt

SEQ ID NO: 1320 - RNA, 20 nt, synthetic construct
  source 1..20: mol_type = other RNA
acctctccatcctcttgctt

SEQ ID NO: 1321 - RNA, 20 nt, synthetic construct
  source 1..20: mol_type = other RNA
acctgaaggaggcggcaggg

SEQ ID NO: 1322 - RNA, 20 nt, synthetic construct
  source 1..20: mol_type = other RNA
acctgagccagctcccatag

SEQ ID NO: 1323 - RNA, 20 nt, synthetic construct
  source 1..20: mol_type = other RNA
acctgcattctctcccctgg

SEQ ID NO: 1324 - RNA, 20 nt, synthetic construct
  source 1..20: mol_type = other RNA
acctgcctgggaaggggaaa

SEQ ID NO: 1325 - RNA, 20 nt, synthetic construct
  source 1..20: mol_type = other RNA
acgagagatggcacaggccc

SEQ ID NO: 1326 - RNA, 20 nt, synthetic construct
  source 1..20: mol_type = other RNA
acgcaagggagacatccgtc

SEQ ID NO: 1327 - RNA, 20 nt, synthetic construct
  source 1..20: mol_type = other RNA
acgctgccgtctctctcctg

SEQ ID NO: 1328 - RNA, 20 nt, synthetic construct
  source 1..20: mol_type = other RNA
acggaacctgaaggaggcgg

SEQ ID NO: 1329 - RNA, 20 nt, synthetic construct
  source 1..20: mol_type = other RNA
acggatgtctcccttgcgtc

SEQ ID NO: 1330 - RNA, 20 nt, synthetic construct
  source 1..20: mol_type = other RNA
acggcagcgttagagggcag

SEQ ID NO: 1331 - RNA, 20 nt, synthetic construct
  source 1..20: mol_type = other RNA
acggcatggggttgggtgag

SEQ ID NO: 1332 - RNA, 20 nt, synthetic construct
  source 1..20: mol_type = other RNA
acggctggcccagatccttc

SEQ ID NO: 1333 - RNA, 20 nt, synthetic construct
  source 1..20: mol_type = other RNA
acggggaggatccgctcaga

SEQ ID NO: 1334 - RNA, 20 nt, synthetic construct
  source 1..20: mol_type = other RNA
acggggtactttggggttgt

SEQ ID NO: 1335 - RNA, 20 nt, synthetic construct
  source 1..20: mol_type = other RNA
acggggtgtcagcatagggt

SEQ ID NO: 1336 - RNA, 20 nt, synthetic construct
  source 1..20: mol_type = other RNA
acggggtgtccaggcaaaga

SEQ ID NO: 1337 - RNA, 20 nt, synthetic construct
  source 1..20: mol_type = other RNA
acggtgatgatgcaggccta

SEQ ID NO: 1338 - RNA, 20 nt, synthetic construct
  source 1..20: mol_type = other RNA
acgtgatgtcctctgagcgg

SEQ ID NO: 1339 - RNA, 20 nt, synthetic construct
  source 1..20: mol_type = other RNA
acgtggtgcagcgccgagaa

SEQ ID NO: 1340 - RNA, 20 nt, synthetic construct
  source 1..20: mol_type = other RNA
actagagaggtaaggggggt

SEQ ID NO: 1341 - RNA, 20 nt, synthetic construct
  source 1..20: mol_type = other RNA
actcaggagagagacggcag

SEQ ID NO: 1342 - RNA, 20 nt, synthetic construct
  source 1..20: mol_type = other RNA
actccaatgcggaagagagt

SEQ ID NO: 1343 - RNA, 20 nt, synthetic construct
  source 1..20: mol_type = other RNA
actccctcttccccttgctc

SEQ ID NO: 1344 - RNA, 20 nt, synthetic construct
  source 1..20: mol_type = other RNA
actcctttcatttgggcagc

SEQ ID NO: 1345 - RNA, 20 nt, synthetic construct
  source 1..20: mol_type = other RNA
actcgctgggttcccttttc

SEQ ID NO: 1346 - RNA, 20 nt, synthetic construct
  source 1..20: mol_type = other RNA
actcgggggcgagaggaggg

SEQ ID NO: 1347 - RNA, 20 nt, synthetic construct
  source 1..20: mol_type = other RNA
actctcttccgcattggagt

SEQ ID NO: 1348 - RNA, 20 nt, synthetic construct
  source 1..20: mol_type = other RNA
actctgccccaggcctcctt

SEQ ID NO: 1349 - RNA, 20 nt, synthetic construct
  source 1..20: mol_type = other RNA
actctgccctctaacgctgc

SEQ ID NO: 1350 - RNA, 20 nt, synthetic construct
  source 1..20: mol_type = other RNA
actctgtgctgaccactctg

SEQ ID NO: 1351 - RNA, 20 nt, synthetic construct
  source 1..20: mol_type = other RNA
actgagctatgggagctggc

SEQ ID NO: 1352 - RNA, 20 nt, synthetic construct
  source 1..20: mol_type = other RNA
actgcatgggtcagcacagg

SEQ ID NO: 1353 - RNA, 20 nt, synthetic construct
  source 1..20: mol_type = other RNA
actggccctggctttggcag

SEQ ID NO: 1354 - RNA, 20 nt, synthetic construct
  source 1..20: mol_type = other RNA
actggccctgggcttagcca

SEQ ID NO: 1355 - RNA, 20 nt, synthetic construct
  source 1..20: mol_type = other RNA
actggcttctgcgccgcctc

SEQ ID NO: 1356 - RNA, 20 nt, synthetic construct
  source 1..20: mol_type = other RNA
actgggacggggtgtcagca

SEQ ID NO: 1357 - RNA, 20 nt, synthetic construct
  source 1..20: mol_type = other RNA
actgtttccccttcccaggc

SEQ ID NO: 1358 - RNA, 20 nt, synthetic construct
  source 1..20: mol_type = other RNA
acttcccctcttccgatgtt

SEQ ID NO: 1359 - RNA, 20 nt, synthetic construct
  source 1..20: mol_type = other RNA
acttccgaattggagccgct

SEQ ID NO: 1360 - RNA, 20 nt, synthetic construct
  source 1..20: mol_type = other RNA
acttccttctcggcgctgca

SEQ ID NO: 1361 - RNA, 20 nt, synthetic construct
  source 1..20: mol_type = other RNA
actttgagctctactggctt

SEQ ID NO: 1362 - RNA, 20 nt, synthetic construct
  source 1..20: mol_type = other RNA
actttgcgctgccctcctct

SEQ ID NO: 1363 - RNA, 20 nt, synthetic construct
  source 1..20: mol_type = other RNA
actttggggttgtccagaaa

SEQ ID NO: 1364 - RNA, 20 nt, synthetic construct
  source 1..20: mol_type = other RNA
actttgtctccttccctgcc

SEQ ID NO: 1365 - RNA, 20 nt, synthetic construct
  source 1..20: mol_type = other RNA
agaaaaacggtgatgatgca

SEQ ID NO: 1366 - RNA, 20 nt, synthetic construct
  source 1..20: mol_type = other RNA
agaaacgagagatggcacag

SEQ ID NO: 1367 - RNA, 20 nt, synthetic construct
  source 1..20: mol_type = other RNA
agaaagcaagaggatggaga

SEQ ID NO: 1368 - RNA, 20 nt, synthetic construct
  source 1..20: mol_type = other RNA
agaaagcaggacctgcctgg

SEQ ID NO: 1369 - RNA, 20 nt, synthetic construct
  source 1..20: mol_type = other RNA
agaaagcggcacaggcccag

SEQ ID NO: 1370 - RNA, 20 nt, synthetic construct
  source 1..20: mol_type = other RNA
agaacggggtgtccaggcaa

SEQ ID NO: 1371 - RNA, 20 nt, synthetic construct
  source 1..20: mol_type = other RNA
agaagccagtagagctcaaa

SEQ ID NO: 1372 - RNA, 20 nt, synthetic construct
  source 1..20: mol_type = other RNA
agaaggaaaagggaacccag

SEQ ID NO: 1373 - RNA, 20 nt, synthetic construct
  source 1..20: mol_type = other RNA
agaaggaagtgctccggaaa

SEQ ID NO: 1374 - RNA, 20 nt, synthetic construct
  source 1..20: mol_type = other RNA
agaaggagaaggaaaaggga

SEQ ID NO: 1375 - RNA, 20 nt, synthetic construct
  source 1..20: mol_type = other RNA
agaaggccatcctaagaaac

SEQ ID NO: 1376 - RNA, 20 nt, synthetic construct
  source 1..20: mol_type = other RNA
agaaggggaggcgggacgca

SEQ ID NO: 1377 - RNA, 20 nt, synthetic construct
  source 1..20: mol_type = other RNA
agaatgcaggtcagagaaag

SEQ ID NO: 1378 - RNA, 20 nt, synthetic construct
  source 1..20: mol_type = other RNA
agacaaagtccaggaccggc

SEQ ID NO: 1379 - RNA, 20 nt, synthetic construct
  source 1..20: mol_type = other RNA
agacacggggaggatccgct

SEQ ID NO: 1380 - RNA, 20 nt, synthetic construct
  source 1..20: mol_type = other RNA
agacagaaagcggcacaggc

SEQ ID NO: 1381 - RNA, 20 nt, synthetic construct
  source 1..20: mol_type = other RNA
agacatccgtcggagaaggc

SEQ ID NO: 1382 - RNA, 20 nt, synthetic construct
  source 1..20: mol_type = other RNA
agaccagactgagctatggg

SEQ ID NO: 1383 - RNA, 20 nt, synthetic construct
  source 1..20: mol_type = other RNA
agacggaacctgaaggaggc

SEQ ID NO: 1384 - RNA, 20 nt, synthetic construct
  source 1..20: mol_type = other RNA
agacggcagcgttagagggc

SEQ ID NO: 1385 - RNA, 20 nt, synthetic construct
  source 1..20: mol_type = other RNA
agacggcatggggttgggtg

SEQ ID NO: 1386 - RNA, 20 nt, synthetic construct
  source 1..20: mol_type = other RNA
agacggggtactttggggtt

SEQ ID NO: 1387 - RNA, 20 nt, synthetic construct
  source 1..20: mol_type = other RNA
agactagagaggtaaggggg

SEQ ID NO: 1388 - RNA, 20 nt, synthetic construct
  source 1..20: mol_type = other RNA
agactgagctatgggagctg

SEQ ID NO: 1389 - RNA, 20 nt, synthetic construct
  source 1..20: mol_type = other RNA
agagaaagcaggacctgcct

SEQ ID NO: 1390 - RNA, 20 nt, synthetic construct
  source 1..20: mol_type = other RNA
agagaatgcaggtcagagaa

SEQ ID NO: 1391 - RNA, 20 nt, synthetic construct
  source 1..20: mol_type = other RNA
agagacggcagcgttagagg

SEQ ID NO: 1392 - RNA, 20 nt, synthetic construct
  source 1..20: mol_type = other RNA
agagagacggcagcgttaga

SEQ ID NO: 1393 - RNA, 20 nt, synthetic construct
  source 1..20: mol_type = other RNA
agagagcaaggggaagaggg

SEQ ID NO: 1394 - RNA, 20 nt, synthetic construct
  source 1..20: mol_type = other RNA
agagaggtaaggggggtagg

SEQ ID NO: 1395 - RNA, 20 nt, synthetic construct
  source 1..20: mol_type = other RNA
agagagtaggtcgaagggga

SEQ ID NO: 1396 - RNA, 20 nt, synthetic construct
  source 1..20: mol_type = other RNA
agagatgcccggagaggacc

SEQ ID NO: 1397 - RNA, 20 nt, synthetic construct
  source 1..20: mol_type = other RNA
agagatggcacaggccccag

SEQ ID NO: 1398 - RNA, 20 nt, synthetic construct
  source 1..20: mol_type = other RNA
agagcaaggggaagagggag

SEQ ID NO: 1399 - RNA, 20 nt, synthetic construct
  source 1..20: mol_type = other RNA
agagcatccttgggcagcaa

SEQ ID NO: 1400 - RNA, 20 nt, synthetic construct
  source 1..20: mol_type = other RNA
agagctcaaagtggtccgga

SEQ ID NO: 1401 - RNA, 20 nt, synthetic construct
  source 1..20: mol_type = other RNA
agaggacatcacgtggtgca

SEQ ID NO: 1402 - RNA, 20 nt, synthetic construct
  source 1..20: mol_type = other RNA
agaggacccagacacgggga

SEQ ID NO: 1403 - RNA, 20 nt, synthetic construct
  source 1..20: mol_type = other RNA
agaggagggcagcgcaaagt

SEQ ID NO: 1404 - RNA, 20 nt, synthetic construct
  source 1..20: mol_type = other RNA
agaggatggagaggtggcta

SEQ ID NO: 1405 - RNA, 20 nt, synthetic construct
  source 1..20: mol_type = other RNA
agaggcggcgcagaagccag

SEQ ID NO: 1406 - RNA, 20 nt, synthetic construct
  source 1..20: mol_type = other RNA
agagggagtggaggaagacg

SEQ ID NO: 1407 - RNA, 20 nt, synthetic construct
  source 1..20: mol_type = other RNA
agagggcagagttccggcgg

SEQ ID NO: 1408 - RNA, 20 nt, synthetic construct
  source 1..20: mol_type = other RNA
agagggcagggcagggaagg

SEQ ID NO: 1409 - RNA, 20 nt, synthetic construct
  source 1..20: mol_type = other RNA
agaggggaagtcgagggagg

SEQ ID NO: 1410 - RNA, 20 nt, synthetic construct
  source 1..20: mol_type = other RNA
agaggtaaggggggtagggg

SEQ ID NO: 1411 - RNA, 20 nt, synthetic construct
  source 1..20: mol_type = other RNA
agaggtgacccaggccacaa

SEQ ID NO: 1412 - RNA, 20 nt, synthetic construct
  source 1..20: mol_type = other RNA
agaggtgacccgaatccaca

SEQ ID NO: 1413 - RNA, 20 nt, synthetic construct
  source 1..20: mol_type = other RNA
agaggtggctaaagccaggg

SEQ ID NO: 1414 - RNA, 20 nt, synthetic construct
  source 1..20: mol_type = other RNA
agagtaggtcgaaggggaat

SEQ ID NO: 1415 - RNA, 20 nt, synthetic construct
  source 1..20: mol_type = other RNA
agagtggctaagcccagggc

SEQ ID NO: 1416 - RNA, 20 nt, synthetic construct
  source 1..20: mol_type = other RNA
agagtggtcagcacagagtg

SEQ ID NO: 1417 - RNA, 20 nt, synthetic construct
  source 1..20: mol_type = other RNA
agagttccggcggcacagca

SEQ ID NO: 1418 - RNA, 20 nt, synthetic construct
  source 1..20: mol_type = other RNA
agatagaccagactgagcta

SEQ ID NO: 1419 - RNA, 20 nt, synthetic construct
  source 1..20: mol_type = other RNA
agatccttccctgccgcctc

SEQ ID NO: 1420 - RNA, 20 nt, synthetic construct
  source 1..20: mol_type = other RNA
agatgcccggagaggaccca

SEQ ID NO: 1421 - RNA, 20 nt, synthetic construct
  source 1..20: mol_type = other RNA
agatggcacaggccccagaa

SEQ ID NO: 1422 - RNA, 20 nt, synthetic construct
  source 1..20: mol_type = other RNA
agcaacacagcagagagcaa

SEQ ID NO: 1423 - RNA, 20 nt, synthetic construct
  source 1..20: mol_type = other RNA
agcaagaggatggagaggtg

SEQ ID NO: 1424 - RNA, 20 nt, synthetic construct
  source 1..20: mol_type = other RNA
agcaagggcactcgggggcg

SEQ ID NO: 1425 - RNA, 20 nt, synthetic construct
  source 1..20: mol_type = other RNA
agcaaggggaagagggagtg

SEQ ID NO: 1426 - RNA, 20 nt, synthetic construct
  source 1..20: mol_type = other RNA
agcacagactagagaggtaa

SEQ ID NO: 1427 - RNA, 20 nt, synthetic construct
  source 1..20: mol_type = other RNA
agcacagagtggctaagccc

SEQ ID NO: 1428 - RNA, 20 nt, synthetic construct
  source 1..20: mol_type = other RNA
agcacaggctgccaaagcca

SEQ ID NO: 1429 - RNA, 20 nt, synthetic construct
  source 1..20: mol_type = other RNA
agcacttccttctcggcgct

SEQ ID NO: 1430 - RNA, 20 nt, synthetic construct
  source 1..20: mol_type = other RNA
agcagagagcaaggggaaga

SEQ ID NO: 1431 - RNA, 20 nt, synthetic construct
  source 1..20: mol_type = other RNA
agcaggacctgcctgggaag

SEQ ID NO: 1432 - RNA, 20 nt, synthetic construct
  source 1..20: mol_type = other RNA
agcatagggtggcaaagccc

SEQ ID NO: 1433 - RNA, 20 nt, synthetic construct
  source 1..20: mol_type = other RNA
agcatccttgggcagcaaca

SEQ ID NO: 1434 - RNA, 20 nt, synthetic construct
  source 1..20: mol_type = other RNA
agccacctctccatcctctt

SEQ ID NO: 1435 - RNA, 20 nt, synthetic construct
  source 1..20: mol_type = other RNA
agccactctgtgctgaccac

SEQ ID NO: 1436 - RNA, 20 nt, synthetic construct
  source 1..20: mol_type = other RNA
agccagctcccatagctcag

SEQ ID NO: 1437 - RNA, 20 nt, synthetic construct
  source 1..20: mol_type = other RNA
agccagggagacggggtact

SEQ ID NO: 1438 - RNA, 20 nt, synthetic construct
  source 1..20: mol_type = other RNA
agccagggccagttaaagcg

SEQ ID NO: 1439 - RNA, 20 nt, synthetic construct
  source 1..20: mol_type = other RNA
agccagtagagctcaaagtg

SEQ ID NO: 1440 - RNA, 20 nt, synthetic construct
  source 1..20: mol_type = other RNA
agcccagggccagttgaagc

SEQ ID NO: 1441 - RNA, 20 nt, synthetic construct
  source 1..20: mol_type = other RNA
agcccctccagccggtcctg

SEQ ID NO: 1442 - RNA, 20 nt, synthetic construct
  source 1..20: mol_type = other RNA
agccgcttcaactggccctg

SEQ ID NO: 1443 - RNA, 20 nt, synthetic construct
  source 1..20: mol_type = other RNA
agccggtcctggactttgtc

SEQ ID NO: 1444 - RNA, 20 nt, synthetic construct
  source 1..20: mol_type = other RNA
agccgtagaggtgacccagg

SEQ ID NO: 1445 - RNA, 20 nt, synthetic construct
  source 1..20: mol_type = other RNA
agcctgtgctgacccatgca

SEQ ID NO: 1446 - RNA, 20 nt, synthetic construct
  source 1..20: mol_type = other RNA
agcgactccaatgcggaaga

SEQ ID NO: 1447 - RNA, 20 nt, synthetic construct
  source 1..20: mol_type = other RNA
agcgagtgaagacggcatgg

SEQ ID NO: 1448 - RNA, 20 nt, synthetic construct
  source 1..20: mol_type = other RNA
agcgcaaagtgacaatggcc

SEQ ID NO: 1449 - RNA, 20 nt, synthetic construct
  source 1..20: mol_type = other RNA
agcgccgagaaggaagtgct

SEQ ID NO: 1450 - RNA, 20 nt, synthetic construct
  source 1..20: mol_type = other RNA
agcggatcctccccgtgtct

SEQ ID NO: 1451 - RNA, 20 nt, synthetic construct
  source 1..20: mol_type = other RNA
agcggcacaggcccagggga

SEQ ID NO: 1452 - RNA, 20 nt, synthetic construct
  source 1..20: mol_type = other RNA
agcggctccaattcggaagt

SEQ ID NO: 1453 - RNA, 20 nt, synthetic construct
  source 1..20: mol_type = other RNA
agcgttagagggcagagttc

SEQ ID NO: 1454 - RNA, 20 nt, synthetic construct
  source 1..20: mol_type = other RNA
agctagcacagactagagag

SEQ ID NO: 1455 - RNA, 20 nt, synthetic construct
  source 1..20: mol_type = other RNA
agctatgggagctggctcag

SEQ ID NO: 1456 - RNA, 20 nt, synthetic construct
  source 1..20: mol_type = other RNA
agctcaaagtggtccggact

SEQ ID NO: 1457 - RNA, 20 nt, synthetic construct
  source 1..20: mol_type = other RNA
agctcagtctggtctatctg

SEQ ID NO: 1458 - RNA, 20 nt, synthetic construct
  source 1..20: mol_type = other RNA
agctcccatagctcagtctg

SEQ ID NO: 1459 - RNA, 20 nt, synthetic construct
  source 1..20: mol_type = other RNA
agctcccctaccccccttac

SEQ ID NO: 1460 - RNA, 20 nt, synthetic construct
  source 1..20: mol_type = other RNA
agctctactggcttctgcgc

SEQ ID NO: 1461 - RNA, 20 nt, synthetic construct
  source 1..20: mol_type = other RNA
agctgcagacagaaagcggc

SEQ ID NO: 1462 - RNA, 20 nt, synthetic construct
  source 1..20: mol_type = other RNA
agctgcccaaatgaaaggag

SEQ ID NO: 1463 - RNA, 20 nt, synthetic construct
  source 1..20: mol_type = other RNA
agctggctcaggttcaggag

SEQ ID NO: 1464 - RNA, 20 nt, synthetic construct
  source 1..20: mol_type = other RNA
agcttgtggcctgggtcacc

SEQ ID NO: 1465 - RNA, 20 nt, synthetic construct
  source 1..20: mol_type = other RNA
aggaaaagggaacccagcga

SEQ ID NO: 1466 - RNA, 20 nt, synthetic construct
  source 1..20: mol_type = other RNA
aggaagacggaacctgaagg

SEQ ID NO: 1467 - RNA, 20 nt, synthetic construct
  source 1..20: mol_type = other RNA
aggaagtgctccggaaagag

SEQ ID NO: 1468 - RNA, 20 nt, synthetic construct
  source 1..20: mol_type = other RNA
aggacatcacgtggtgcagc

SEQ ID NO: 1469 - RNA, 20 nt, synthetic construct
  source 1..20: mol_type = other RNA
aggacccagacacggggagg

SEQ ID NO: 1470 - RNA, 20 nt, synthetic construct
  source 1..20: mol_type = other RNA
aggaccggctggaggggctc

SEQ ID NO: 1471 - RNA, 20 nt, synthetic construct
  source 1..20: mol_type = other RNA
aggacctgcctgggaagggg

SEQ ID NO: 1472 - RNA, 20 nt, synthetic construct
  source 1..20: mol_type = other RNA
aggactgcatgggtcagcac

SEQ ID NO: 1473 - RNA, 20 nt, synthetic construct
  source 1..20: mol_type = other RNA
aggagaacggggtgtccagg

SEQ ID NO: 1474 - RNA, 20 nt, synthetic construct
  source 1..20: mol_type = other RNA
aggagaaggaaaagggaacc

SEQ ID NO: 1475 - RNA, 20 nt, synthetic construct
  source 1..20: mol_type = other RNA
aggagacaaagtccaggacc

SEQ ID NO: 1476 - RNA, 20 nt, synthetic construct
  source 1..20: mol_type = other RNA
aggagagagacggcagcgtt

SEQ ID NO: 1477 - RNA, 20 nt, synthetic construct
  source 1..20: mol_type = other RNA
aggagagatgcccggagagg

SEQ ID NO: 1478 - RNA, 20 nt, synthetic construct
  source 1..20: mol_type = other RNA
aggagagggcagggcaggga

SEQ ID NO: 1479 - RNA, 20 nt, synthetic construct
  source 1..20: mol_type = other RNA
aggaggactgcatgggtcag

SEQ ID NO: 1480 - RNA, 20 nt, synthetic construct
  source 1..20: mol_type = other RNA
aggaggcctggggcagagtg

SEQ ID NO: 1481 - RNA, 20 nt, synthetic construct
  source 1..20: mol_type = other RNA
aggaggcggcagggaaggat

SEQ ID NO: 1482 - RNA, 20 nt, synthetic construct
  source 1..20: mol_type = other RNA
aggagggcagcgcaaagtga

SEQ ID NO: 1483 - RNA, 20 nt, synthetic construct
  source 1..20: mol_type = other RNA
aggagtgagaggtgacccga

SEQ ID NO: 1484 - RNA, 20 nt, synthetic construct
  source 1..20: mol_type = other RNA
aggatccgctcagaggacat

SEQ ID NO: 1485 - RNA, 20 nt, synthetic construct
  source 1..20: mol_type = other RNA
aggatctgggccagccgtag

SEQ ID NO: 1486 - RNA, 20 nt, synthetic construct
  source 1..20: mol_type = other RNA
aggatgctctttccggagca

SEQ ID NO: 1487 - RNA, 20 nt, synthetic construct
  source 1..20: mol_type = other RNA
aggatggagaggtggctaaa

SEQ ID NO: 1488 - RNA, 20 nt, synthetic construct
  source 1..20: mol_type = other RNA
aggatggccttctccgacgg

SEQ ID NO: 1489 - RNA, 20 nt, synthetic construct
  source 1..20: mol_type = other RNA
aggcaaagaaagcaagagga

SEQ ID NO: 1490 - RNA, 20 nt, synthetic construct
  source 1..20: mol_type = other RNA
aggcagatagaccagactga

SEQ ID NO: 1491 - RNA, 20 nt, synthetic construct
  source 1..20: mol_type = other RNA
aggcaggtcctgctttctct

SEQ ID NO: 1492 - RNA, 20 nt, synthetic construct
  source 1..20: mol_type = other RNA
aggccacaagctgcagacag

SEQ ID NO: 1493 - RNA, 20 nt, synthetic construct
  source 1..20: mol_type = other RNA
aggccatcctaagaaacgag

SEQ ID NO: 1494 - RNA, 20 nt, synthetic construct
  source 1..20: mol_type = other RNA
aggcccaggggagagaatgc

SEQ ID NO: 1495 - RNA, 20 nt, synthetic construct
  source 1..20: mol_type = other RNA
aggccccagaaggagaagga

SEQ ID NO: 1496 - RNA, 20 nt, synthetic construct
  source 1..20: mol_type = other RNA
aggcctacaagaaggggagg

SEQ ID NO: 1497 - RNA, 20 nt, synthetic construct
  source 1..20: mol_type = other RNA
aggcctccttaccattcccc

SEQ ID NO: 1498 - RNA, 20 nt, synthetic construct
  source 1..20: mol_type = other RNA
aggcctgcatcatcaccgtt

SEQ ID NO: 1499 - RNA, 20 nt, synthetic construct
  source 1..20: mol_type = other RNA
aggcctggggcagagtggtc

SEQ ID NO: 1500 - RNA, 20 nt, synthetic construct
  source 1..20: mol_type = other RNA
aggcggcagggaaggatctg

SEQ ID NO: 1501 - RNA, 20 nt, synthetic construct
  source 1..20: mol_type = other RNA
aggcggcgcagaagccagta

SEQ ID NO: 1502 - RNA, 20 nt, synthetic construct
  source 1..20: mol_type = other RNA
aggcgggacgcaagggagac

SEQ ID NO: 1503 - RNA, 20 nt, synthetic construct
  source 1..20: mol_type = other RNA
aggctgccaaagccagggcc

SEQ ID NO: 1504 - RNA, 20 nt, synthetic construct
  source 1..20: mol_type = other RNA
agggaacccagcgagtgaag

SEQ ID NO: 1505 - RNA, 20 nt, synthetic construct
  source 1..20: mol_type = other RNA
agggaaggagacaaagtcca

SEQ ID NO: 1506 - RNA, 20 nt, synthetic construct
  source 1..20: mol_type = other RNA
agggaaggatctgggccagc

SEQ ID NO: 1507 - RNA, 20 nt, synthetic construct
  source 1..20: mol_type = other RNA
agggagacatccgtcggaga

SEQ ID NO: 1508 - RNA, 20 nt, synthetic construct
  source 1..20: mol_type = other RNA
agggagacggggtactttgg

SEQ ID NO: 1509 - RNA, 20 nt, synthetic construct
  source 1..20: mol_type = other RNA
agggaggagagatgcccgga

SEQ ID NO: 1510 - RNA, 20 nt, synthetic construct
  source 1..20: mol_type = other RNA
agggagggatggtaaggagg

SEQ ID NO: 1511 - RNA, 20 nt, synthetic construct
  source 1..20: mol_type = other RNA
agggagtggaggaagacgga

SEQ ID NO: 1512 - RNA, 20 nt, synthetic construct
  source 1..20: mol_type = other RNA
agggatggtaaggaggactg

SEQ ID NO: 1513 - RNA, 20 nt, synthetic construct
  source 1..20: mol_type = other RNA
agggcactcgggggcgagag

SEQ ID NO: 1514 - RNA, 20 nt, synthetic construct
  source 1..20: mol_type = other RNA
agggcagagttccggcggca

SEQ ID NO: 1515 - RNA, 20 nt, synthetic construct
  source 1..20: mol_type = other RNA
agggcagcgcaaagtgacaa

SEQ ID NO: 1516 - RNA, 20 nt, synthetic construct
  source 1..20: mol_type = other RNA
agggcagggaaggagacaaa

SEQ ID NO: 1517 - RNA, 20 nt, synthetic construct
  source 1..20: mol_type = other RNA
agggcagggcagggaaggag

SEQ ID NO: 1518 - RNA, 20 nt, synthetic construct
  source 1..20: mol_type = other RNA
agggccaggcagatagacca

SEQ ID NO: 1519 - RNA, 20 nt, synthetic construct
  source 1..20: mol_type = other RNA
agggccagttaaagcgactc

SEQ ID NO: 1520 - RNA, 20 nt, synthetic construct
  source 1..20: mol_type = other RNA
agggccagttgaagcggctc

SEQ ID NO: 1521 - RNA, 20 nt, synthetic construct
  source 1..20: mol_type = other RNA
aggggaaacagtgggccaga

SEQ ID NO: 1522 - RNA, 20 nt, synthetic construct
  source 1..20: mol_type = other RNA
aggggaagagggagtggagg

SEQ ID NO: 1523 - RNA, 20 nt, synthetic construct
  source 1..20: mol_type = other RNA
aggggaagtcgagggaggga

SEQ ID NO: 1524 - RNA, 20 nt, synthetic construct
  source 1..20: mol_type = other RNA
aggggaatggtaaggaggcc

SEQ ID NO: 1525 - RNA, 20 nt, synthetic construct
  source 1..20: mol_type = other RNA
aggggaatggtaagggggac

SEQ ID NO: 1526 - RNA, 20 nt, synthetic construct
  source 1..20: mol_type = other RNA
aggggagagaatgcaggtca

SEQ ID NO: 1527 - RNA, 20 nt, synthetic construct
  source 1..20: mol_type = other RNA
aggggagctgcccaaatgaa

SEQ ID NO: 1528 - RNA, 20 nt, synthetic construct
  source 1..20: mol_type = other RNA
aggggaggcgggacgcaagg

SEQ ID NO: 1529 - RNA, 20 nt, synthetic construct
  source 1..20: mol_type = other RNA
aggggctcaacatcggaaga

SEQ ID NO: 1530 - RNA, 20 nt, synthetic construct
  source 1..20: mol_type = other RNA
agggggactgggacggggtg

SEQ ID NO: 1531 - RNA, 20 nt, synthetic construct
  source 1..20: mol_type = other RNA
aggggggtaggggagctgcc

SEQ ID NO: 1532 - RNA, 20 nt, synthetic construct
  source 1..20: mol_type = other RNA
agggtggcaaagcccagggc

SEQ ID NO: 1533 - RNA, 20 nt, synthetic construct
  source 1..20: mol_type = other RNA
aggtaaggggggtaggggag

SEQ ID NO: 1534 - RNA, 20 nt, synthetic construct
  source 1..20: mol_type = other RNA
aggtcagagaaagcaggacc

SEQ ID NO: 1535 - RNA, 20 nt, synthetic construct
  source 1..20: mol_type = other RNA
aggtcctgctttctctgacc

SEQ ID NO: 1536 - RNA, 20 nt, synthetic construct
  source 1..20: mol_type = other RNA
aggtcgaaggggaatggtaa

SEQ ID NO: 1537 - RNA, 20 nt, synthetic construct
  source 1..20: mol_type = other RNA
aggtgacccaggccacaagc

SEQ ID NO: 1538 - RNA, 20 nt, synthetic construct
  source 1..20: mol_type = other RNA
aggtgacccgaatccacagg

SEQ ID NO: 1539 - RNA, 20 nt, synthetic construct
  source 1..20: mol_type = other RNA
aggtggctaaagccagggag

SEQ ID NO: 1540 - RNA, 20 nt, synthetic construct
  source 1..20: mol_type = other RNA
aggttcaggagagggcaggg

SEQ ID NO: 1541 - RNA, 20 nt, synthetic construct
  source 1..20: mol_type = other RNA
aggttccgtcttcctccact

SEQ ID NO: 1542 - RNA, 20 nt, synthetic construct
  source 1..20: mol_type = other RNA
agtaccccgtctccctggct

SEQ ID NO: 1543 - RNA, 20 nt, synthetic construct
  source 1..20: mol_type = other RNA
agtagagctcaaagtggtcc

SEQ ID NO: 1544 - RNA, 20 nt, synthetic construct
  source 1..20: mol_type = other RNA
agtaggtcgaaggggaatgg

SEQ ID NO: 1545 - RNA, 20 nt, synthetic construct
  source 1..20: mol_type = other RNA
agtccaggaccggctggagg

SEQ ID NO: 1546 - RNA, 20 nt, synthetic construct
  source 1..20: mol_type = other RNA
agtcccccttaccattcccc

SEQ ID NO: 1547 - RNA, 20 nt, synthetic construct
  source 1..20: mol_type = other RNA
agtccggaccactttgagct

SEQ ID NO: 1548 - RNA, 20 nt, synthetic construct
  source 1..20: mol_type = other RNA
agtcctccttaccatccctc

SEQ ID NO: 1549 - RNA, 20 nt, synthetic construct
  source 1..20: mol_type = other RNA
agtcgagggagggatggtaa

SEQ ID NO: 1550 - RNA, 20 nt, synthetic construct
  source 1..20: mol_type = other RNA
agtcgctttaactggccctg

SEQ ID NO: 1551 - RNA, 20 nt, synthetic construct
  source 1..20: mol_type = other RNA
agtctggtctatctgcctgg

SEQ ID NO: 1552 - RNA, 20 nt, synthetic construct
  source 1..20: mol_type = other RNA
agtgaagacggcatggggtt

SEQ ID NO: 1553 - RNA, 20 nt, synthetic construct
  source 1..20: mol_type = other RNA
agtgacaatggccagggcca

SEQ ID NO: 1554 - RNA, 20 nt, synthetic construct
  source 1..20: mol_type = other RNA
agtgagaggtgacccgaatc

SEQ ID NO: 1555 - RNA, 20 nt, synthetic construct
  source 1..20: mol_type = other RNA
agtgcccttgctgtgccgcc

SEQ ID NO: 1556 - RNA, 20 nt, synthetic construct
  source 1..20: mol_type = other RNA
agtgctccggaaagagcatc

SEQ ID NO: 1557 - RNA, 20 nt, synthetic construct
  source 1..20: mol_type = other RNA
agtggaggaagacggaacct

SEQ ID NO: 1558 - RNA, 20 nt, synthetic construct
  source 1..20: mol_type = other RNA
agtggctaagcccagggcca

SEQ ID NO: 1559 - RNA, 20 nt, synthetic construct
  source 1..20: mol_type = other RNA
agtgggccagaggcggcgca

SEQ ID NO: 1560 - RNA, 20 nt, synthetic construct
  source 1..20: mol_type = other RNA
agtggggtggtcgaagggga

SEQ ID NO: 1561 - RNA, 20 nt, synthetic construct
  source 1..20: mol_type = other RNA
agtggtcagcacagagtggc

SEQ ID NO: 1562 - RNA, 20 nt, synthetic construct
  source 1..20: mol_type = other RNA
agtggtccggactcaggaga

SEQ ID NO: 1563 - RNA, 20 nt, synthetic construct
  source 1..20: mol_type = other RNA
agttaaagcgactccaatgc

SEQ ID NO: 1564 - RNA, 20 nt, synthetic construct
  source 1..20: mol_type = other RNA
agttccggcggcacagcaag

SEQ ID NO: 1565 - RNA, 20 nt, synthetic construct
  source 1..20: mol_type = other RNA
agttgaagcggctccaattc

SEQ ID NO: 1566 - RNA, 20 nt, synthetic construct
  source 1..20: mol_type = other RNA
atagaccagactgagctatg

SEQ ID NO: 1567 - RNA, 20 nt, synthetic construct
  source 1..20: mol_type = other RNA
atagctcagtctggtctatc

SEQ ID NO: 1568 - RNA, 20 nt, synthetic construct
  source 1..20: mol_type = other RNA
atagggtggcaaagcccagg

SEQ ID NO: 1569 - RNA, 20 nt, synthetic construct
  source 1..20: mol_type = other RNA
atcaccgtttttctggacaa

SEQ ID NO: 1570 - RNA, 20 nt, synthetic construct
  source 1..20: mol_type = other RNA
atcacgtggtgcagcgccga

SEQ ID NO: 1571 - RNA, 20 nt, synthetic construct
  source 1..20: mol_type = other RNA
atcatcaccgtttttctgga

SEQ ID NO: 1572 - RNA, 20 nt, synthetic construct
  source 1..20: mol_type = other RNA
atccacaggagaacggggtg

SEQ ID NO: 1573 - RNA, 20 nt, synthetic construct
  source 1..20: mol_type = other RNA
atccctccctcgacttcccc

SEQ ID NO: 1574 - RNA, 20 nt, synthetic construct
  source 1..20: mol_type = other RNA
atccgctcagaggacatcac

SEQ ID NO: 1575 - RNA, 20 nt, synthetic construct
  source 1..20: mol_type = other RNA
atccgtcggagaaggccatc

SEQ ID NO: 1576 - RNA, 20 nt, synthetic construct
  source 1..20: mol_type = other RNA
atcctaagaaacgagagatg

SEQ ID NO: 1577 - RNA, 20 nt, synthetic construct
  source 1..20: mol_type = other RNA
atcctccccgtgtctgggtc

SEQ ID NO: 1578 - RNA, 20 nt, synthetic construct
  source 1..20: mol_type = other RNA
atcctcttgctttctttgcc

SEQ ID NO: 1579 - RNA, 20 nt, synthetic construct
  source 1..20: mol_type = other RNA
atccttccctgccgcctcct

SEQ ID NO: 1580 - RNA, 20 nt, synthetic construct
  source 1..20: mol_type = other RNA
atccttgggcagcaacacag

SEQ ID NO: 1581 - RNA, 20 nt, synthetic construct
  source 1..20: mol_type = other RNA
atcggaagaggggaagtcga

SEQ ID NO: 1582 - RNA, 20 nt, synthetic construct
  source 1..20: mol_type = other RNA
atctctcctccctcacccaa

SEQ ID NO: 1583 - RNA, 20 nt, synthetic construct
  source 1..20: mol_type = other RNA
atctctcgtttcttaggatg

SEQ ID NO: 1584 - RNA, 20 nt, synthetic construct
  source 1..20: mol_type = other RNA
atctgcctggccctggccat

SEQ ID NO: 1585 - RNA, 20 nt, synthetic construct
  source 1..20: mol_type = other RNA
atctgggccagccgtagagg

SEQ ID NO: 1586 - RNA, 20 nt, synthetic construct
  source 1..20: mol_type = other RNA
atgaaaggagtgagaggtga

SEQ ID NO: 1587 - RNA, 20 nt, synthetic construct
  source 1..20: mol_type = other RNA
atgatgcaggcctacaagaa

SEQ ID NO: 1588 - RNA, 20 nt, synthetic construct
  source 1..20: mol_type = other RNA
atgcaggcctacaagaaggg

SEQ ID NO: 1589 - RNA, 20 nt, synthetic construct
  source 1..20: mol_type = other RNA
atgcaggtcagagaaagcag

SEQ ID NO: 1590 - RNA, 20 nt, synthetic construct
  source 1..20: mol_type = other RNA
atgcagtcctccttaccatc

SEQ ID NO: 1591 - RNA, 20 nt, synthetic construct
  source 1..20: mol_type = other RNA
atgcccggagaggacccaga

SEQ ID NO: 1592 - RNA, 20 nt, synthetic construct
  source 1..20: mol_type = other RNA
atgccgtcttcactcgctgg

SEQ ID NO: 1593 - RNA, 20 nt, synthetic construct
  source 1..20: mol_type = other RNA
atgcggaagagagtaggtcg

SEQ ID NO: 1594 - RNA, 20 nt, synthetic construct
  source 1..20: mol_type = other RNA
atgctctttccggagcactt

SEQ ID NO: 1595 - RNA, 20 nt, synthetic construct
  source 1..20: mol_type = other RNA
atgctgacaccccgtcccag

SEQ ID NO: 1596 - RNA, 20 nt, synthetic construct
  source 1..20: mol_type = other RNA
atggagaggtggctaaagcc

SEQ ID NO: 1597 - RNA, 20 nt, synthetic construct
  source 1..20: mol_type = other RNA
atggcacaggccccagaagg

SEQ ID NO: 1598 - RNA, 20 nt, synthetic construct
  source 1..20: mol_type = other RNA
atggccagggccaggcagat

SEQ ID NO: 1599 - RNA, 20 nt, synthetic construct
  source 1..20: mol_type = other RNA
atggccttctccgacggatg

SEQ ID NO: 1600 - RNA, 20 nt, synthetic construct
  source 1..20: mol_type = other RNA
atgggagctggctcaggttc

SEQ ID NO: 1601 - RNA, 20 nt, synthetic construct
  source 1..20: mol_type = other RNA
atggggttgggtgagggagg

SEQ ID NO: 1602 - RNA, 20 nt, synthetic construct
  source 1..20: mol_type = other RNA
atgggtcagcacaggctgcc

SEQ ID NO: 1603 - RNA, 20 nt, synthetic construct
  source 1..20: mol_type = other RNA
atggtaaggaggactgcatg

SEQ ID NO: 1604 - RNA, 20 nt, synthetic construct
  source 1..20: mol_type = other RNA
atggtaaggaggcctggggc

SEQ ID NO: 1605 - RNA, 20 nt, synthetic construct
  source 1..20: mol_type = other RNA
atggtaagggggactgggac

SEQ ID NO: 1606 - RNA, 20 nt, synthetic construct
  source 1..20: mol_type = other RNA
atgtcctctgagcggatcct

SEQ ID NO: 1607 - RNA, 20 nt, synthetic construct
  source 1..20: mol_type = other RNA
atgtctcccttgcgtcccgc

SEQ ID NO: 1608 - RNA, 20 nt, synthetic construct
  source 1..20: mol_type = other RNA
atgttgagcccctccagccg

SEQ ID NO: 1609 - RNA, 20 nt, synthetic construct
  source 1..20: mol_type = other RNA
attccccttcgaccacccca

SEQ ID NO: 1610 - RNA, 20 nt, synthetic construct
  source 1..20: mol_type = other RNA
attccccttcgacctactct

SEQ ID NO: 1611 - RNA, 20 nt, synthetic construct
  source 1..20: mol_type = other RNA
attcggaagtggggtggtcg

SEQ ID NO: 1612 - RNA, 20 nt, synthetic construct
  source 1..20: mol_type = other RNA
attcgggtcacctctcactc

SEQ ID NO: 1613 - RNA, 20 nt, synthetic construct
  source 1..20: mol_type = other RNA
attctctcccctgggcctgt

SEQ ID NO: 1614 - RNA, 20 nt, synthetic construct
  source 1..20: mol_type = other RNA
attggagccgcttcaactgg

SEQ ID NO: 1615 - RNA, 20 nt, synthetic construct
  source 1..20: mol_type = other RNA
attggagtcgctttaactgg

SEQ ID NO: 1616 - RNA, 20 nt, synthetic construct
  source 1..20: mol_type = other RNA
attgtcactttgcgctgccc

SEQ ID NO: 1617 - RNA, 20 nt, synthetic construct
  source 1..20: mol_type = other RNA
atttgggcagctcccctacc

SEQ ID NO: 1618 - RNA, 20 nt, synthetic construct
  source 1..20: mol_type = other RNA
caaagaaagcaagaggatgg

SEQ ID NO: 1619 - RNA, 20 nt, synthetic construct
  source 1..20: mol_type = other RNA
caaagccagggccagttaaa

SEQ ID NO: 1620 - RNA, 20 nt, synthetic construct
  source 1..20: mol_type = other RNA
caaagcccagggccaggaac

SEQ ID NO: 1621 - RNA, 20 nt, synthetic construct
  source 1..20: mol_type = other RNA
caaagtaccccgtctccctg

SEQ ID NO: 1622 - RNA, 20 nt, synthetic construct
  source 1..20: mol_type = other RNA
caaagtccaggaccggctgg

SEQ ID NO: 1623 - RNA, 20 nt, synthetic construct
  source 1..20: mol_type = other RNA
caaagtgacaatggccaggg

SEQ ID NO: 1624 - RNA, 20 nt, synthetic construct
  source 1..20: mol_type = other RNA
caaagtggtccggactcagg

SEQ ID NO: 1625 - RNA, 20 nt, synthetic construct
  source 1..20: mol_type = other RNA
caaatgaaaggagtgagagg

SEQ ID NO: 1626 - RNA, 20 nt, synthetic construct
  source 1..20: mol_type = other RNA
caacacagcagagagcaagg

SEQ ID NO: 1627 - RNA, 20 nt, synthetic construct
  source 1..20: mol_type = other RNA
caacatcggaagaggggaag

SEQ ID NO: 1628 - RNA, 20 nt, synthetic construct
  source 1..20: mol_type = other RNA
caaccccaaagtaccccgtc

SEQ ID NO: 1629 - RNA, 20 nt, synthetic construct
  source 1..20: mol_type = other RNA
caaccccatgccgtcttcac

SEQ ID NO: 1630 - RNA, 20 nt, synthetic construct
  source 1..20: mol_type = other RNA
caactggccctgggcttagc

SEQ ID NO: 1631 - RNA, 20 nt, synthetic construct
  source 1..20: mol_type = other RNA
caagaaggggaggcgggacg

SEQ ID NO: 1632 - RNA, 20 nt, synthetic construct
  source 1..20: mol_type = other RNA
caagaggatggagaggtggc

SEQ ID NO: 1633 - RNA, 20 nt, synthetic construct
  source 1..20: mol_type = other RNA
caagctgcagacagaaagcg

SEQ ID NO: 1634 - RNA, 20 nt, synthetic construct
  source 1..20: mol_type = other RNA
caaggatgctctttccggag

SEQ ID NO: 1635 - RNA, 20 nt, synthetic construct
  source 1..20: mol_type = other RNA
caagggagacatccgtcgga

SEQ ID NO: 1636 - RNA, 20 nt, synthetic construct
  source 1..20: mol_type = other RNA
caagggcactcgggggcgag

SEQ ID NO: 1637 - RNA, 20 nt, synthetic construct
  source 1..20: mol_type = other RNA
caaggggaagagggagtgga

SEQ ID NO: 1638 - RNA, 20 nt, synthetic construct
  source 1..20: mol_type = other RNA
caatgcggaagagagtaggt

SEQ ID NO: 1639 - RNA, 20 nt, synthetic construct
  source 1..20: mol_type = other RNA
caatggccagggccaggcag

SEQ ID NO: 1640 - RNA, 20 nt, synthetic construct
  source 1..20: mol_type = other RNA
caattcggaagtggggtggt

SEQ ID NO: 1641 - RNA, 20 nt, synthetic construct
  source 1..20: mol_type = other RNA
cacaagctgcagacagaaag

SEQ ID NO: 1642 - RNA, 20 nt, synthetic construct
  source 1..20: mol_type = other RNA
cacagactagagaggtaagg

SEQ ID NO: 1643 - RNA, 20 nt, synthetic construct
  source 1..20: mol_type = other RNA
cacagagtggctaagcccag

SEQ ID NO: 1644 - RNA, 20 nt, synthetic construct
  source 1..20: mol_type = other RNA
cacagcaagggcactcgggg

SEQ ID NO: 1645 - RNA, 20 nt, synthetic construct
  source 1..20: mol_type = other RNA
cacagcagagagcaagggga

SEQ ID NO: 1646 - RNA, 20 nt, synthetic construct
  source 1..20: mol_type = other RNA
cacaggagaacggggtgtcc

SEQ ID NO: 1647 - RNA, 20 nt, synthetic construct
  source 1..20: mol_type = other RNA
cacaggcccaggggagagaa

SEQ ID NO: 1648 - RNA, 20 nt, synthetic construct
  source 1..20: mol_type = other RNA
cacaggccccagaaggagaa

SEQ ID NO: 1649 - RNA, 20 nt, synthetic construct
  source 1..20: mol_type = other RNA
cacaggctgccaaagccagg

SEQ ID NO: 1650 - RNA, 20 nt, synthetic construct
  source 1..20: mol_type = other RNA
caccacgtgatgtcctctga

SEQ ID NO: 1651 - RNA, 20 nt, synthetic construct
  source 1..20: mol_type = other RNA
cacccaaccccatgccgtct

SEQ ID NO: 1652 - RNA, 20 nt, synthetic construct
  source 1..20: mol_type = other RNA
caccccacttccgaattgga

SEQ ID NO: 1653 - RNA, 20 nt, synthetic construct
  source 1..20: mol_type = other RNA
caccccgtcccagtccccct

SEQ ID NO: 1654 - RNA, 20 nt, synthetic construct
  source 1..20: mol_type = other RNA
caccccgttctcctgtggat

SEQ ID NO: 1655 - RNA, 20 nt, synthetic construct
  source 1..20: mol_type = other RNA
caccctatgctgacaccccg

SEQ ID NO: 1656 - RNA, 20 nt, synthetic construct
  source 1..20: mol_type = other RNA
caccgtttttctggacaacc

SEQ ID NO: 1657 - RNA, 20 nt, synthetic construct
  source 1..20: mol_type = other RNA
cacctctacggctggcccag

SEQ ID NO: 1658 - RNA, 20 nt, synthetic construct
  source 1..20: mol_type = other RNA
cacctctcactcctttcatt

SEQ ID NO: 1659 - RNA, 20 nt, synthetic construct
  source 1..20: mol_type = other RNA
cacctctccatcctcttgct

SEQ ID NO: 1660 - RNA, 20 nt, synthetic construct
  source 1..20: mol_type = other RNA
cacggggaggatccgctcag

SEQ ID NO: 1661 - RNA, 20 nt, synthetic construct
  source 1..20: mol_type = other RNA
cacgtgatgtcctctgagcg

SEQ ID NO: 1662 - RNA, 20 nt, synthetic construct
  source 1..20: mol_type = other RNA
cacgtggtgcagcgccgaga

SEQ ID NO: 1663 - RNA, 20 nt, synthetic construct
  source 1..20: mol_type = other RNA
cactccctcttccccttgct

SEQ ID NO: 1664 - RNA, 20 nt, synthetic construct
  source 1..20: mol_type = other RNA
cactcctttcatttgggcag

SEQ ID NO: 1665 - RNA, 20 nt, synthetic construct
  source 1..20: mol_type = other RNA
cactcgctgggttccctttt

SEQ ID NO: 1666 - RNA, 20 nt, synthetic construct
  source 1..20: mol_type = other RNA
cactcgggggcgagaggagg

SEQ ID NO: 1667 - RNA, 20 nt, synthetic construct
  source 1..20: mol_type = other RNA
cactctgccccaggcctcct

SEQ ID NO: 1668 - RNA, 20 nt, synthetic construct
  source 1..20: mol_type = other RNA
cactctgtgctgaccactct

SEQ ID NO: 1669 - RNA, 20 nt, synthetic construct
  source 1..20: mol_type = other RNA
cactgtttccccttcccagg

SEQ ID NO: 1670 - RNA, 20 nt, synthetic construct
  source 1..20: mol_type = other RNA
cacttccgaattggagccgc

SEQ ID NO: 1671 - RNA, 20 nt, synthetic construct
  source 1..20: mol_type = other RNA
cacttccttctcggcgctgc

SEQ ID NO: 1672 - RNA, 20 nt, synthetic construct
  source 1..20: mol_type = other RNA
cactttgagctctactggct

SEQ ID NO: 1673 - RNA, 20 nt, synthetic construct
  source 1..20: mol_type = other RNA
cactttgcgctgccctcctc

SEQ ID NO: 1674 - RNA, 20 nt, synthetic construct
  source 1..20: mol_type = other RNA
cagaaaaacggtgatgatgc

SEQ ID NO: 1675 - RNA, 20 nt, synthetic construct
  source 1..20: mol_type = other RNA
cagaaagcggcacaggccca

SEQ ID NO: 1676 - RNA, 20 nt, synthetic construct
  source 1..20: mol_type = other RNA
cagaagccagtagagctcaa

SEQ ID NO: 1677 - RNA, 20 nt, synthetic construct
  source 1..20: mol_type = other RNA
cagaaggagaaggaaaaggg

SEQ ID NO: 1678 - RNA, 20 nt, synthetic construct
  source 1..20: mol_type = other RNA
cagacacggggaggatccgc

SEQ ID NO: 1679 - RNA, 20 nt, synthetic construct
  source 1..20: mol_type = other RNA
cagacagaaagcggcacagg

SEQ ID NO: 1680 - RNA, 20 nt, synthetic construct
  source 1..20: mol_type = other RNA
cagactagagaggtaagggg

SEQ ID NO: 1681 - RNA, 20 nt, synthetic construct
  source 1..20: mol_type = other RNA
cagactgagctatgggagct

SEQ ID NO: 1682 - RNA, 20 nt, synthetic construct
  source 1..20: mol_type = other RNA
cagagaaagcaggacctgcc

SEQ ID NO: 1683 - RNA, 20 nt, synthetic construct
  source 1..20: mol_type = other RNA
cagagagcaaggggaagagg

SEQ ID NO: 1684 - RNA, 20 nt, synthetic construct
  source 1..20: mol_type = other RNA
cagaggacatcacgtggtgc

SEQ ID NO: 1685 - RNA, 20 nt, synthetic construct
  source 1..20: mol_type = other RNA
cagaggcggcgcagaagcca

SEQ ID NO: 1686 - RNA, 20 nt, synthetic construct
  source 1..20: mol_type = other RNA
cagagtggctaagcccaggg

SEQ ID NO: 1687 - RNA, 20 nt, synthetic construct
  source 1..20: mol_type = other RNA
cagagtggtcagcacagagt

SEQ ID NO: 1688 - RNA, 20 nt, synthetic construct
  source 1..20: mol_type = other RNA
cagagttccggcggcacagc

SEQ ID NO: 1689 - RNA, 20 nt, synthetic construct
  source 1..20: mol_type = other RNA
cagatagaccagactgagct

SEQ ID NO: 1690 - RNA, 20 nt, synthetic construct
  source 1..20: mol_type = other RNA
cagatccttccctgccgcct

SEQ ID NO: 1691 - RNA, 20 nt, synthetic construct
  source 1..20: mol_type = other RNA
cagcaacacagcagagagca

SEQ ID NO: 1692 - RNA, 20 nt, synthetic construct
  source 1..20: mol_type = other RNA
cagcaagggcactcgggggc

SEQ ID NO: 1693 - RNA, 20 nt, synthetic construct
  source 1..20: mol_type = other RNA
cagcacagagtggctaagcc

SEQ ID NO: 1694 - RNA, 20 nt, synthetic construct
  source 1..20: mol_type = other RNA
cagcacaggctgccaaagcc

SEQ ID NO: 1695 - RNA, 20 nt, synthetic construct
  source 1..20: mol_type = other RNA
cagcagagagcaaggggaag

SEQ ID NO: 1696 - RNA, 20 nt, synthetic construct
  source 1..20: mol_type = other RNA
cagcatagggtggcaaagcc

SEQ ID NO: 1697 - RNA, 20 nt, synthetic construct
  source 1..20: mol_type = other RNA
cagccggtcctggactttgt

SEQ ID NO: 1698 - RNA, 20 nt, synthetic construct
  source 1..20: mol_type = other RNA
cagccgtagaggtgacccag

SEQ ID NO: 1699 - RNA, 20 nt, synthetic construct
  source 1..20: mol_type = other RNA
cagcctgtgctgacccatgc

SEQ ID NO: 1700 - RNA, 20 nt, synthetic construct
  source 1..20: mol_type = other RNA
cagcgagtgaagacggcatg

SEQ ID NO: 1701 - RNA, 20 nt, synthetic construct
  source 1..20: mol_type = other RNA
cagcgcaaagtgacaatggc

SEQ ID NO: 1702 - RNA, 20 nt, synthetic construct
  source 1..20: mol_type = other RNA
cagcgccgagaaggaagtgc

SEQ ID NO: 1703 - RNA, 20 nt, synthetic construct
  source 1..20: mol_type = other RNA
cagcgttagagggcagagtt

SEQ ID NO: 1704 - RNA, 20 nt, synthetic construct
  source 1..20: mol_type = other RNA
cagctcccatagctcagtct

SEQ ID NO: 1705 - RNA, 20 nt, synthetic construct
  source 1..20: mol_type = other RNA
cagctcccctacccccctta

SEQ ID NO: 1706 - RNA, 20 nt, synthetic construct
  source 1..20: mol_type = other RNA
cagcttgtggcctgggtcac

SEQ ID NO: 1707 - RNA, 20 nt, synthetic construct
  source 1..20: mol_type = other RNA
caggaccggctggaggggct

SEQ ID NO: 1708 - RNA, 20 nt, synthetic construct
  source 1..20: mol_type = other RNA
caggacctgcctgggaaggg

SEQ ID NO: 1709 - RNA, 20 nt, synthetic construct
  source 1..20: mol_type = other RNA
caggagaacggggtgtccag

SEQ ID NO: 1710 - RNA, 20 nt, synthetic construct
  source 1..20: mol_type = other RNA
caggagagagacggcagcgt

SEQ ID NO: 1711 - RNA, 20 nt, synthetic construct
  source 1..20: mol_type = other RNA
caggagagggcagggcaggg

SEQ ID NO: 1712 - RNA, 20 nt, synthetic construct
  source 1..20: mol_type = other RNA
caggcaaagaaagcaagagg

SEQ ID NO: 1713 - RNA, 20 nt, synthetic construct
  source 1..20: mol_type = other RNA
caggcagatagaccagactg

SEQ ID NO: 1714 - RNA, 20 nt, synthetic construct
  source 1..20: mol_type = other RNA
caggcaggtcctgctttctc

SEQ ID NO: 1715 - RNA, 20 nt, synthetic construct
  source 1..20: mol_type = other RNA
caggccacaagctgcagaca

SEQ ID NO: 1716 - RNA, 20 nt, synthetic construct
  source 1..20: mol_type = other RNA
caggcccaggggagagaatg

SEQ ID NO: 1717 - RNA, 20 nt, synthetic construct
  source 1..20: mol_type = other RNA
caggccccagaaggagaagg

SEQ ID NO: 1718 - RNA, 20 nt, synthetic construct
  source 1..20: mol_type = other RNA
caggcctacaagaaggggag

SEQ ID NO: 1719 - RNA, 20 nt, synthetic construct
  source 1..20: mol_type = other RNA
caggcctccttaccattccc

SEQ ID NO: 1720 - RNA, 20 nt, synthetic construct
  source 1..20: mol_type = other RNA
caggctgccaaagccagggc

SEQ ID NO: 1721 - RNA, 20 nt, synthetic construct
  source 1..20: mol_type = other RNA
cagggaaggagacaaagtcc

SEQ ID NO: 1722 - RNA, 20 nt, synthetic construct
  source 1..20: mol_type = other RNA
cagggaaggatctgggccag

SEQ ID NO: 1723 - RNA, 20 nt, synthetic construct
  source 1..20: mol_type = other RNA
cagggagacggggtactttg

SEQ ID NO: 1724 - RNA, 20 nt, synthetic construct
  source 1..20: mol_type = other RNA
cagggcagggaaggagacaa

SEQ ID NO: 1725 - RNA, 20 nt, synthetic construct
  source 1..20: mol_type = other RNA
cagggccaggcagatagacc

SEQ ID NO: 1726 - RNA, 20 nt, synthetic construct
  source 1..20: mol_type = other RNA
cagggccagttaaagcgact

SEQ ID NO: 1727 - RNA, 20 nt, synthetic construct
  source 1..20: mol_type = other RNA
cagggccagttgaagcggct

SEQ ID NO: 1728 - RNA, 20 nt, synthetic construct
  source 1..20: mol_type = other RNA
caggggagagaatgcaggtc

SEQ ID NO: 1729 - RNA, 20 nt, synthetic construct
  source 1..20: mol_type = other RNA
caggtcagagaaagcaggac

SEQ ID NO: 1730 - RNA, 20 nt, synthetic construct
  source 1..20: mol_type = other RNA
caggtcctgctttctctgac

SEQ ID NO: 1731 - RNA, 20 nt, synthetic construct
  source 1..20: mol_type = other RNA
caggttcaggagagggcagg

SEQ ID NO: 1732 - RNA, 20 nt, synthetic construct
  source 1..20: mol_type = other RNA
caggttccgtcttcctccac

SEQ ID NO: 1733 - RNA, 20 nt, synthetic construct
  source 1..20: mol_type = other RNA
cagtagagctcaaagtggtc

SEQ ID NO: 1734 - RNA, 20 nt, synthetic construct
  source 1..20: mol_type = other RNA
cagtcccccttaccattccc

SEQ ID NO: 1735 - RNA, 20 nt, synthetic construct
  source 1..20: mol_type = other RNA
cagtcctccttaccatccct

SEQ ID NO: 1736 - RNA, 20 nt, synthetic construct
  source 1..20: mol_type = other RNA
cagtctggtctatctgcctg

SEQ ID NO: 1737 - RNA, 20 nt, synthetic construct
  source 1..20: mol_type = other RNA
cagtgggccagaggcggcgc

SEQ ID NO: 1738 - RNA, 20 nt, synthetic construct
  source 1..20: mol_type = other RNA
cagttaaagcgactccaatg

SEQ ID NO: 1739 - RNA, 20 nt, synthetic construct
  source 1..20: mol_type = other RNA
cagttgaagcggctccaatt

SEQ ID NO: 1740 - RNA, 20 nt, synthetic construct
  source 1..20: mol_type = other RNA
catagctcagtctggtctat

SEQ ID NO: 1741 - RNA, 20 nt, synthetic construct
  source 1..20: mol_type = other RNA
catagggtggcaaagcccag

SEQ ID NO: 1742 - RNA, 20 nt, synthetic construct
  source 1..20: mol_type = other RNA
catcaccgtttttctggaca

SEQ ID NO: 1743 - RNA, 20 nt, synthetic construct
  source 1..20: mol_type = other RNA
catcacgtggtgcagcgccg

SEQ ID NO: 1744 - RNA, 20 nt, synthetic construct
  source 1..20: mol_type = other RNA
catcatcaccgtttttctgg

SEQ ID NO: 1745 - RNA, 20 nt, synthetic construct
  source 1..20: mol_type = other RNA
catccctccctcgacttccc

SEQ ID NO: 1746 - RNA, 20 nt, synthetic construct
  source 1..20: mol_type = other RNA
catccgtcggagaaggccat

SEQ ID NO: 1747 - RNA, 20 nt, synthetic construct
  source 1..20: mol_type = other RNA
catcctaagaaacgagagat

SEQ ID NO: 1748 - RNA, 20 nt, synthetic construct
  source 1..20: mol_type = other RNA
catcctcttgctttctttgc

SEQ ID NO: 1749 - RNA, 20 nt, synthetic construct
  source 1..20: mol_type = other RNA
catccttgggcagcaacaca

SEQ ID NO: 1750 - RNA, 20 nt, synthetic construct
  source 1..20: mol_type = other RNA
catcggaagaggggaagtcg

SEQ ID NO: 1751 - RNA, 20 nt, synthetic construct
  source 1..20: mol_type = other RNA
catctctcctccctcaccca

SEQ ID NO: 1752 - RNA, 20 nt, synthetic construct
  source 1..20: mol_type = other RNA
catctctcgtttcttaggat

SEQ ID NO: 1753 - RNA, 20 nt, synthetic construct
  source 1..20: mol_type = other RNA
catgcagtcctccttaccat

SEQ ID NO: 1754 - RNA, 20 nt, synthetic construct
  source 1..20: mol_type = other RNA
catgccgtcttcactcgctg

SEQ ID NO: 1755 - RNA, 20 nt, synthetic construct
  source 1..20: mol_type = other RNA
catggggttgggtgagggag

SEQ ID NO: 1756 - RNA, 20 nt, synthetic construct
  source 1..20: mol_type = other RNA
catgggtcagcacaggctgc

SEQ ID NO: 1757 - RNA, 20 nt, synthetic construct
  source 1..20: mol_type = other RNA
cattccccttcgaccacccc

SEQ ID NO: 1758 - RNA, 20 nt, synthetic construct
  source 1..20: mol_type = other RNA
cattccccttcgacctactc

SEQ ID NO: 1759 - RNA, 20 nt, synthetic construct
  source 1..20: mol_type = other RNA
cattctctcccctgggcctg

SEQ ID NO: 1760 - RNA, 20 nt, synthetic construct
  source 1..20: mol_type = other RNA
cattggagtcgctttaactg

SEQ ID NO: 1761 - RNA, 20 nt, synthetic construct
  source 1..20: mol_type = other RNA
cattgtcactttgcgctgcc

SEQ ID NO: 1762 - RNA, 20 nt, synthetic construct
  source 1..20: mol_type = other RNA
catttgggcagctcccctac

SEQ ID NO: 1763 - RNA, 20 nt, synthetic construct
  source 1..20: mol_type = other RNA
ccaaagccagggccagttaa

SEQ ID NO: 1764 - RNA, 20 nt, synthetic construct
  source 1..20: mol_type = other RNA
ccaaagtaccccgtctccct

SEQ ID NO: 1765 - RNA, 20 nt, synthetic construct
  source 1..20: mol_type = other RNA
ccaaatgaaaggagtgagag

SEQ ID NO: 1766 - RNA, 20 nt, synthetic construct
  source 1..20: mol_type = other RNA
ccaaccccatgccgtcttca

SEQ ID NO: 1767 - RNA, 20 nt, synthetic construct
  source 1..20: mol_type = other RNA
ccaaggatgctctttccgga

SEQ ID NO: 1768 - RNA, 20 nt, synthetic construct
  source 1..20: mol_type = other RNA
ccaatgcggaagagagtagg

SEQ ID NO: 1769 - RNA, 20 nt, synthetic construct
  source 1..20: mol_type = other RNA
ccaattcggaagtggggtgg

SEQ ID NO: 1770 - RNA, 20 nt, synthetic construct
  source 1..20: mol_type = other RNA
ccacaagctgcagacagaaa

SEQ ID NO: 1771 - RNA, 20 nt, synthetic construct
  source 1..20: mol_type = other RNA
ccacaggagaacggggtgtc

SEQ ID NO: 1772 - RNA, 20 nt, synthetic construct
  source 1..20: mol_type = other RNA
ccaccccacttccgaattgg

SEQ ID NO: 1773 - RNA, 20 nt, synthetic construct
  source 1..20: mol_type = other RNA
ccaccctatgctgacacccc

SEQ ID NO: 1774 - RNA, 20 nt, synthetic construct
  source 1..20: mol_type = other RNA
ccacctctccatcctcttgc

SEQ ID NO: 1775 - RNA, 20 nt, synthetic construct
  source 1..20: mol_type = other RNA
ccacgtgatgtcctctgagc

SEQ ID NO: 1776 - RNA, 20 nt, synthetic construct
  source 1..20: mol_type = other RNA
ccactccctcttccccttgc

SEQ ID NO: 1777 - RNA, 20 nt, synthetic construct
  source 1..20: mol_type = other RNA
ccactctgccccaggcctcc

SEQ ID NO: 1778 - RNA, 20 nt, synthetic construct
  source 1..20: mol_type = other RNA
ccactctgtgctgaccactc

SEQ ID NO: 1779 - RNA, 20 nt, synthetic construct
  source 1..20: mol_type = other RNA
ccactgtttccccttcccag

SEQ ID NO: 1780 - RNA, 20 nt, synthetic construct
  source 1..20: mol_type = other RNA
ccacttccgaattggagccg

SEQ ID NO: 1781 - RNA, 20 nt, synthetic construct
  source 1..20: mol_type = other RNA
ccactttgagctctactggc

SEQ ID NO: 1782 - RNA, 20 nt, synthetic construct
  source 1..20: mol_type = other RNA
ccagaaaaacggtgatgatg

SEQ ID NO: 1783 - RNA, 20 nt, synthetic construct
  source 1..20: mol_type = other RNA
ccagaaggagaaggaaaagg

SEQ ID NO: 1784 - RNA, 20 nt, synthetic construct
  source 1..20: mol_type = other RNA
ccagacacggggaggatccg

SEQ ID NO: 1785 - RNA, 20 nt, synthetic construct
  source 1..20: mol_type = other RNA
ccagactgagctatgggagc

SEQ ID NO: 1786 - RNA, 20 nt, synthetic construct
  source 1..20: mol_type = other RNA
ccagaggcggcgcagaagcc

SEQ ID NO: 1787 - RNA, 20 nt, synthetic construct
  source 1..20: mol_type = other RNA
ccagatccttccctgccgcc

SEQ ID NO: 1788 - RNA, 20 nt, synthetic construct
  source 1..20: mol_type = other RNA
ccagccggtcctggactttg

SEQ ID NO: 1789 - RNA, 20 nt, synthetic construct
  source 1..20: mol_type = other RNA
ccagccgtagaggtgaccca

SEQ ID NO: 1790 - RNA, 20 nt, synthetic construct
  source 1..20: mol_type = other RNA
ccagcgagtgaagacggcat

SEQ ID NO: 1791 - RNA, 20 nt, synthetic construct
  source 1..20: mol_type = other RNA
ccagctcccatagctcagtc

SEQ ID NO: 1792 - RNA, 20 nt, synthetic construct
  source 1..20: mol_type = other RNA
ccaggaccggctggaggggc

SEQ ID NO: 1793 - RNA, 20 nt, synthetic construct
  source 1..20: mol_type = other RNA
ccaggcaaagaaagcaagag

SEQ ID NO: 1794 - RNA, 20 nt, synthetic construct
  source 1..20: mol_type = other RNA
ccaggcagatagaccagact

SEQ ID NO: 1795 - RNA, 20 nt, synthetic construct
  source 1..20: mol_type = other RNA
ccaggcaggtcctgctttct

SEQ ID NO: 1796 - RNA, 20 nt, synthetic construct
  source 1..20: mol_type = other RNA
ccaggccacaagctgcagac

SEQ ID NO: 1797 - RNA, 20 nt, synthetic construct
  source 1..20: mol_type = other RNA
ccaggcctccttaccattcc

SEQ ID NO: 1798 - RNA, 20 nt, synthetic construct
  source 1..20: mol_type = other RNA
ccagggagacggggtacttt

SEQ ID NO: 1799 - RNA, 20 nt, synthetic construct
  source 1..20: mol_type = other RNA
ccagggccaggcagatagac

SEQ ID NO: 1800 - RNA, 20 nt, synthetic construct
  source 1..20: mol_type = other RNA
ccagggccagttaaagcgac

SEQ ID NO: 1801 - RNA, 20 nt, synthetic construct
  source 1..20: mol_type = other RNA
ccagggccagttgaagcggc

SEQ ID NO: 1802 - RNA, 20 nt, synthetic construct
  source 1..20: mol_type = other RNA
ccaggggagagaatgcaggt

SEQ ID NO: 1803 - RNA, 20 nt, synthetic construct
  source 1..20: mol_type = other RNA
ccagtagagctcaaagtggt

SEQ ID NO: 1804 - RNA, 20 nt, synthetic construct
  source 1..20: mol_type = other RNA
ccagtcccccttaccattcc

SEQ ID NO: 1805 - RNA, 20 nt, synthetic construct
  source 1..20: mol_type = other RNA
ccagttaaagcgactccaat

SEQ ID NO: 1806 - RNA, 20 nt, synthetic construct
  source 1..20: mol_type = other RNA
ccagttgaagcggctccaat

SEQ ID NO: 1807 - RNA, 20 nt, synthetic construct
  source 1..20: mol_type = other RNA
ccatagctcagtctggtcta

SEQ ID NO: 1808 - RNA, 20 nt, synthetic construct
  source 1..20: mol_type = other RNA
ccatccctccctcgacttcc

SEQ ID NO: 1809 - RNA, 20 nt, synthetic construct
  source 1..20: mol_type = other RNA
ccatcctaagaaacgagaga

SEQ ID NO: 1810 - RNA, 20 nt, synthetic construct
  source 1..20: mol_type = other RNA
ccatcctcttgctttctttg

SEQ ID NO: 1811 - RNA, 20 nt, synthetic construct
  source 1..20: mol_type = other RNA
ccatctctcgtttcttagga

SEQ ID NO: 1812 - RNA, 20 nt, synthetic construct
  source 1..20: mol_type = other RNA
ccatgcagtcctccttacca

SEQ ID NO: 1813 - RNA, 20 nt, synthetic construct
  source 1..20: mol_type = other RNA
ccatgccgtcttcactcgct

SEQ ID NO: 1814 - RNA, 20 nt, synthetic construct
  source 1..20: mol_type = other RNA
ccattccccttcgaccaccc

SEQ ID NO: 1815 - RNA, 20 nt, synthetic construct
  source 1..20: mol_type = other RNA
ccattccccttcgacctact

SEQ ID NO: 1816 - RNA, 20 nt, synthetic construct
  source 1..20: mol_type = other RNA
ccattgtcactttgcgctgc

SEQ ID NO: 1817 - RNA, 20 nt, synthetic construct
  source 1..20: mol_type = other RNA
cccaaagtaccccgtctccc

SEQ ID NO: 1818 - RNA, 20 nt, synthetic construct
  source 1..20: mol_type = other RNA
cccaaatgaaaggagtgaga

SEQ ID NO: 1819 - RNA, 20 nt, synthetic construct
  source 1..20: mol_type = other RNA
cccaaccccatgccgtcttc

SEQ ID NO: 1820 - RNA, 20 nt, synthetic construct
  source 1..20: mol_type = other RNA
cccaaggatgctctttccgg

SEQ ID NO: 1821 - RNA, 20 nt, synthetic construct
  source 1..20: mol_type = other RNA
cccactgtttccccttccca

SEQ ID NO: 1822 - RNA, 20 nt, synthetic construct
  source 1..20: mol_type = other RNA
cccacttccgaattggagcc

SEQ ID NO: 1823 - RNA, 20 nt, synthetic construct
  source 1..20: mol_type = other RNA
cccagaaggagaaggaaaag

SEQ ID NO: 1824 - RNA, 20 nt, synthetic construct
  source 1..20: mol_type = other RNA
cccagacacggggaggatcc

SEQ ID NO: 1825 - RNA, 20 nt, synthetic construct
  source 1..20: mol_type = other RNA
cccagatccttccctgccgc

SEQ ID NO: 1826 - RNA, 20 nt, synthetic construct
  source 1..20: mol_type = other RNA
cccagcgagtgaagacggca

SEQ ID NO: 1827 - RNA, 20 nt, synthetic construct
  source 1..20: mol_type = other RNA
cccaggcaggtcctgctttc

SEQ ID NO: 1828 - RNA, 20 nt, synthetic construct
  source 1..20: mol_type = other RNA
cccaggccacaagctgcaga

SEQ ID NO: 1829 - RNA, 20 nt, synthetic construct
  source 1..20: mol_type = other RNA
cccaggcctccttaccattc

SEQ ID NO: 1830 - RNA, 20 nt, synthetic construct
  source 1..20: mol_type = other RNA
cccagggccagttgaagcgg

SEQ ID NO: 1831 - RNA, 20 nt, synthetic construct
  source 1..20: mol_type = other RNA
cccaggggagagaatgcagg

SEQ ID NO: 1832 - RNA, 20 nt, synthetic construct
  source 1..20: mol_type = other RNA
cccagtcccccttaccattc

SEQ ID NO: 1833 - RNA, 20 nt, synthetic construct
  source 1..20: mol_type = other RNA
cccatagctcagtctggtct

SEQ ID NO: 1834 - RNA, 20 nt, synthetic construct
  source 1..20: mol_type = other RNA
cccatgcagtcctccttacc

SEQ ID NO: 1835 - RNA, 20 nt, synthetic construct
  source 1..20: mol_type = other RNA
cccatgccgtcttcactcgc

SEQ ID NO: 1836 - RNA, 20 nt, synthetic construct
  source 1..20: mol_type = other RNA
ccccaaagtaccccgtctcc

SEQ ID NO: 1837 - RNA, 20 nt, synthetic construct
  source 1..20: mol_type = other RNA
ccccacttccgaattggagc

SEQ ID NO: 1838 - RNA, 20 nt, synthetic construct
  source 1..20: mol_type = other RNA
ccccagaaggagaaggaaaa

SEQ ID NO: 1839 - RNA, 20 nt, synthetic construct
  source 1..20: mol_type = other RNA
ccccaggcctccttaccatt

SEQ ID NO: 1840 - RNA, 20 nt, synthetic construct
  source 1..20: mol_type = other RNA
ccccatgccgtcttcactcg

SEQ ID NO: 1841 - RNA, 20 nt, synthetic construct
  source 1..20: mol_type = other RNA
ccccccttacctctctagtc

SEQ ID NO: 1842 - RNA, 20 nt, synthetic construct
  source 1..20: mol_type = other RNA
cccccgagtgcccttgctgt

SEQ ID NO: 1843 - RNA, 20 nt, synthetic construct
  source 1..20: mol_type = other RNA
cccccttaccattccccttc

SEQ ID NO: 1844 - RNA, 20 nt, synthetic construct
  source 1..20: mol_type = other RNA
cccccttacctctctagtct

SEQ ID NO: 1845 - RNA, 20 nt, synthetic construct
  source 1..20: mol_type = other RNA
ccccgagtgcccttgctgtg

SEQ ID NO: 1846 - RNA, 20 nt, synthetic construct
  source 1..20: mol_type = other RNA
ccccgtcccagtccccctta

SEQ ID NO: 1847 - RNA, 20 nt, synthetic construct
  source 1..20: mol_type = other RNA
ccccgtcgttcctggccctg

SEQ ID NO: 1848 - RNA, 20 nt, synthetic construct
  source 1..20: mol_type = other RNA
ccccgtctccctggctttag

SEQ ID NO: 1849 - RNA, 20 nt, synthetic construct
  source 1..20: mol_type = other RNA
ccccgtgtctgggtcctctc

SEQ ID NO: 1850 - RNA, 20 nt, synthetic construct
  source 1..20: mol_type = other RNA
ccccgttctcctgtggattc

SEQ ID NO: 1851 - RNA, 20 nt, synthetic construct
  source 1..20: mol_type = other RNA
cccctaccccccttacctct

SEQ ID NO: 1852 - RNA, 20 nt, synthetic construct
  source 1..20: mol_type = other RNA
cccctccagccggtcctgga

SEQ ID NO: 1853 - RNA, 20 nt, synthetic construct
  source 1..20: mol_type = other RNA
cccctcttccgatgttgagc

SEQ ID NO: 1854 - RNA, 20 nt, synthetic construct
  source 1..20: mol_type = other RNA
cccctgggcctgtgccgctt

SEQ ID NO: 1855 - RNA, 20 nt, synthetic construct
  source 1..20: mol_type = other RNA
ccccttaccattccccttcg

SEQ ID NO: 1856 - RNA, 20 nt, synthetic construct
  source 1..20: mol_type = other RNA
ccccttacctctctagtctg

SEQ ID NO: 1857 - RNA, 20 nt, synthetic construct
  source 1..20: mol_type = other RNA
ccccttcccaggcaggtcct

SEQ ID NO: 1858 - RNA, 20 nt, synthetic construct
  source 1..20: mol_type = other RNA
ccccttcgaccaccccactt

SEQ ID NO: 1859 - RNA, 20 nt, synthetic construct
  source 1..20: mol_type = other RNA
ccccttcgacctactctctt

SEQ ID NO: 1860 - RNA, 20 nt, synthetic construct
  source 1..20: mol_type = other RNA
ccccttcttgtaggcctgca

SEQ ID NO: 1861 - RNA, 20 nt, synthetic construct
  source 1..20: mol_type = other RNA
ccccttgctctctgctgtgt

SEQ ID NO: 1862 - RNA, 20 nt, synthetic construct
  source 1..20: mol_type = other RNA
cccgaatccacaggagaacg

SEQ ID NO: 1863 - RNA, 20 nt, synthetic construct
  source 1..20: mol_type = other RNA
cccgagtgcccttgctgtgc

SEQ ID NO: 1864 - RNA, 20 nt, synthetic construct
  source 1..20: mol_type = other RNA
cccgcctccccttcttgtag

SEQ ID NO: 1865 - RNA, 20 nt, synthetic construct
  source 1..20: mol_type = other RNA
cccggagaggacccagacac

SEQ ID NO: 1866 - RNA, 20 nt, synthetic construct
  source 1..20: mol_type = other RNA
cccgtcccagtcccccttac

SEQ ID NO: 1867 - RNA, 20 nt, synthetic construct
  source 1..20: mol_type = other RNA
cccgtcgttcctggccctgg

SEQ ID NO: 1868 - RNA, 20 nt, synthetic construct
  source 1..20: mol_type = other RNA
cccgtctccctggctttagc

SEQ ID NO: 1869 - RNA, 20 nt, synthetic construct
  source 1..20: mol_type = other RNA
cccgtgtctgggtcctctcc

SEQ ID NO: 1870 - RNA, 20 nt, synthetic construct
  source 1..20: mol_type = other RNA
cccgttctcctgtggattcg

SEQ ID NO: 1871 - RNA, 20 nt, synthetic construct
  source 1..20: mol_type = other RNA
ccctaccccccttacctctc

SEQ ID NO: 1872 - RNA, 20 nt, synthetic construct
  source 1..20: mol_type = other RNA
ccctatgctgacaccccgtc

SEQ ID NO: 1873 - RNA, 20 nt, synthetic construct
  source 1..20: mol_type = other RNA
ccctcacccaaccccatgcc

SEQ ID NO: 1874 - RNA, 20 nt, synthetic construct
  source 1..20: mol_type = other RNA
ccctccagccggtcctggac

SEQ ID NO: 1875 - RNA, 20 nt, synthetic construct
  source 1..20: mol_type = other RNA
ccctccctcgacttcccctc

SEQ ID NO: 1876 - RNA, 20 nt, synthetic construct
  source 1..20: mol_type = other RNA
ccctcctctcgcccccgagt

SEQ ID NO: 1877 - RNA, 20 nt, synthetic construct
  source 1..20: mol_type = other RNA
ccctcgacttcccctcttcc

SEQ ID NO: 1878 - RNA, 20 nt, synthetic construct
  source 1..20: mol_type = other RNA
ccctctaacgctgccgtctc

SEQ ID NO: 1879 - RNA, 20 nt, synthetic construct
  source 1..20: mol_type = other RNA
ccctctcctgaacctgagcc

SEQ ID NO: 1880 - RNA, 20 nt, synthetic construct
  source 1..20: mol_type = other RNA
ccctcttccccttgctctct

SEQ ID NO: 1881 - RNA, 20 nt, synthetic construct
  source 1..20: mol_type = other RNA
ccctcttccgatgttgagcc

SEQ ID NO: 1882 - RNA, 20 nt, synthetic construct
  source 1..20: mol_type = other RNA
ccctgccctctcctgaacct

SEQ ID NO: 1883 - RNA, 20 nt, synthetic construct
  source 1..20: mol_type = other RNA
ccctgccctgccctctcctg

SEQ ID NO: 1884 - RNA, 20 nt, synthetic construct
  source 1..20: mol_type = other RNA
ccctgccgcctccttcaggt

SEQ ID NO: 1885 - RNA, 20 nt, synthetic construct
  source 1..20: mol_type = other RNA
ccctggccattgtcactttg

SEQ ID NO: 1886 - RNA, 20 nt, synthetic construct
  source 1..20: mol_type = other RNA
ccctggctttagccacctct

SEQ ID NO: 1887 - RNA, 20 nt, synthetic construct
  source 1..20: mol_type = other RNA
ccctggctttggcagcctgt

SEQ ID NO: 1888 - RNA, 20 nt, synthetic construct
  source 1..20: mol_type = other RNA
ccctgggcctgtgccgcttt

SEQ ID NO: 1889 - RNA, 20 nt, synthetic construct
  source 1..20: mol_type = other RNA
ccctgggcttagccactctg

SEQ ID NO: 1890 - RNA, 20 nt, synthetic construct
  source 1..20: mol_type = other RNA
ccctgggctttgccacccta

SEQ ID NO: 1891 - RNA, 20 nt, synthetic construct
  source 1..20: mol_type = other RNA
cccttaccattccccttcga

SEQ ID NO: 1892 - RNA, 20 nt, synthetic construct
  source 1..20: mol_type = other RNA
cccttacctctctagtctgt

SEQ ID NO: 1893 - RNA, 20 nt, synthetic construct
  source 1..20: mol_type = other RNA
cccttcccaggcaggtcctg

SEQ ID NO: 1894 - RNA, 20 nt, synthetic construct
  source 1..20: mol_type = other RNA
cccttcgaccaccccacttc

SEQ ID NO: 1895 - RNA, 20 nt, synthetic construct
  source 1..20: mol_type = other RNA
cccttcgacctactctcttc

SEQ ID NO: 1896 - RNA, 20 nt, synthetic construct
  source 1..20: mol_type = other RNA
cccttcttgtaggcctgcat

SEQ ID NO: 1897 - RNA, 20 nt, synthetic construct
  source 1..20: mol_type = other RNA
cccttgcgtcccgcctcccc

SEQ ID NO: 1898 - RNA, 20 nt, synthetic construct
  source 1..20: mol_type = other RNA
cccttgctctctgctgtgtt

SEQ ID NO: 1899 - RNA, 20 nt, synthetic construct
  source 1..20: mol_type = other RNA
cccttgctgtgccgccggaa

SEQ ID NO: 1900 - RNA, 20 nt, synthetic construct
  source 1..20: mol_type = other RNA
cccttttccttctccttctg

SEQ ID NO: 1901 - RNA, 20 nt, synthetic construct
  source 1..20: mol_type = other RNA
ccgaatccacaggagaacgg

SEQ ID NO: 1902 - RNA, 20 nt, synthetic construct
  source 1..20: mol_type = other RNA
ccgaattggagccgcttcaa

SEQ ID NO: 1903 - RNA, 20 nt, synthetic construct
  source 1..20: mol_type = other RNA
ccgacggatgtctcccttgc

SEQ ID NO: 1904 - RNA, 20 nt, synthetic construct
  source 1..20: mol_type = other RNA
ccgagaaggaagtgctccgg

SEQ ID NO: 1905 - RNA, 20 nt, synthetic construct
  source 1..20: mol_type = other RNA
ccgagtgcccttgctgtgcc

SEQ ID NO: 1906 - RNA, 20 nt, synthetic construct
  source 1..20: mol_type = other RNA
ccgatgttgagcccctccag

SEQ ID NO: 1907 - RNA, 20 nt, synthetic construct
  source 1..20: mol_type = other RNA
ccgcattggagtcgctttaa

SEQ ID NO: 1908 - RNA, 20 nt, synthetic construct
  source 1..20: mol_type = other RNA
ccgccggaactctgccctct

SEQ ID NO: 1909 - RNA, 20 nt, synthetic construct
  source 1..20: mol_type = other RNA
ccgcctccccttcttgtagg

SEQ ID NO: 1910 - RNA, 20 nt, synthetic construct
  source 1..20: mol_type = other RNA
ccgcctccttcaggttccgt

SEQ ID NO: 1911 - RNA, 20 nt, synthetic construct
  source 1..20: mol_type = other RNA
ccgcctctggcccactgttt

SEQ ID NO: 1912 - RNA, 20 nt, synthetic construct
  source 1..20: mol_type = other RNA
ccgctcagaggacatcacgt

SEQ ID NO: 1913 - RNA, 20 nt, synthetic construct
  source 1..20: mol_type = other RNA
ccgcttcaactggccctggg

SEQ ID NO: 1914 - RNA, 20 nt, synthetic construct
  source 1..20: mol_type = other RNA
ccgctttctgtctgcagctt

SEQ ID NO: 1915 - RNA, 20 nt, synthetic construct
  source 1..20: mol_type = other RNA
ccggaaagagcatccttggg

SEQ ID NO: 1916 - RNA, 20 nt, synthetic construct
  source 1..20: mol_type = other RNA
ccggaactctgccctctaac

SEQ ID NO: 1917 - RNA, 20 nt, synthetic construct
  source 1..20: mol_type = other RNA
ccggaccactttgagctcta

SEQ ID NO: 1918 - RNA, 20 nt, synthetic construct
  source 1..20: mol_type = other RNA
ccggactcaggagagagacg

SEQ ID NO: 1919 - RNA, 20 nt, synthetic construct
  source 1..20: mol_type = other RNA
ccggagaggacccagacacg

SEQ ID NO: 1920 - RNA, 20 nt, synthetic construct
  source 1..20: mol_type = other RNA
ccggagcacttccttctcgg

SEQ ID NO: 1921 - RNA, 20 nt, synthetic construct
  source 1..20: mol_type = other RNA
ccggcggcacagcaagggca

SEQ ID NO: 1922 - RNA, 20 nt, synthetic construct
  source 1..20: mol_type = other RNA
ccggctggaggggctcaaca

SEQ ID NO: 1923 - RNA, 20 nt, synthetic construct
  source 1..20: mol_type = other RNA
ccgggcatctctcctccctc

SEQ ID NO: 1924 - RNA, 20 nt, synthetic construct
  source 1..20: mol_type = other RNA
ccggtcctggactttgtctc

SEQ ID NO: 1925 - RNA, 20 nt, synthetic construct
  source 1..20: mol_type = other RNA
ccgtagaggtgacccaggcc

SEQ ID NO: 1926 - RNA, 20 nt, synthetic construct
  source 1..20: mol_type = other RNA
ccgtcccagtcccccttacc

SEQ ID NO: 1927 - RNA, 20 nt, synthetic construct
  source 1..20: mol_type = other RNA
ccgtcggagaaggccatcct

SEQ ID NO: 1928 - RNA, 20 nt, synthetic construct
  source 1..20: mol_type = other RNA
ccgtcgttcctggccctggg

SEQ ID NO: 1929 - RNA, 20 nt, synthetic construct
  source 1..20: mol_type = other RNA
ccgtctccctggctttagcc

SEQ ID NO: 1930 - RNA, 20 nt, synthetic construct
  source 1..20: mol_type = other RNA
ccgtctctctcctgagtccg

SEQ ID NO: 1931 - RNA, 20 nt, synthetic construct
  source 1..20: mol_type = other RNA
ccgtcttcactcgctgggtt

SEQ ID NO: 1932 - RNA, 20 nt, synthetic construct
  source 1..20: mol_type = other RNA
ccgtcttcctccactccctc

SEQ ID NO: 1933 - RNA, 20 nt, synthetic construct
  source 1..20: mol_type = other RNA
ccgtgtctgggtcctctccg

SEQ ID NO: 1934 - RNA, 20 nt, synthetic construct
  source 1..20: mol_type = other RNA
ccgttctcctgtggattcgg

SEQ ID NO: 1935 - RNA, 20 nt, synthetic construct
  source 1..20: mol_type = other RNA
ccgtttttctggacaacccc

SEQ ID NO: 1936 - RNA, 20 nt, synthetic construct
  source 1..20: mol_type = other RNA
cctaagaaacgagagatggc

SEQ ID NO: 1937 - RNA, 20 nt, synthetic construct
  source 1..20: mol_type = other RNA
cctacaagaaggggaggcgg

SEQ ID NO: 1938 - RNA, 20 nt, synthetic construct
  source 1..20: mol_type = other RNA
cctaccccccttacctctct

SEQ ID NO: 1939 - RNA, 20 nt, synthetic construct
  source 1..20: mol_type = other RNA
cctactctcttccgcattgg

SEQ ID NO: 1940 - RNA, 20 nt, synthetic construct
  source 1..20: mol_type = other RNA
cctatgctgacaccccgtcc

SEQ ID NO: 1941 - RNA, 20 nt, synthetic construct
  source 1..20: mol_type = other RNA
cctcacccaaccccatgccg

SEQ ID NO: 1942 - RNA, 20 nt, synthetic construct
  source 1..20: mol_type = other RNA
cctccactccctcttcccct

SEQ ID NO: 1943 - RNA, 20 nt, synthetic construct
  source 1..20: mol_type = other RNA
cctccagccggtcctggact

SEQ ID NO: 1944 - RNA, 20 nt, synthetic construct
  source 1..20: mol_type = other RNA
cctccccgtgtctgggtcct

SEQ ID NO: 1945 - RNA, 20 nt, synthetic construct
  source 1..20: mol_type = other RNA
cctccccttcttgtaggcct

SEQ ID NO: 1946 - RNA, 20 nt, synthetic construct
  source 1..20: mol_type = other RNA
cctccctcacccaaccccat

SEQ ID NO: 1947 - RNA, 20 nt, synthetic construct
  source 1..20: mol_type = other RNA
cctccctcgacttcccctct

SEQ ID NO: 1948 - RNA, 20 nt, synthetic construct
  source 1..20: mol_type = other RNA
cctcctctcgcccccgagtg

SEQ ID NO: 1949 - RNA, 20 nt, synthetic construct
  source 1..20: mol_type = other RNA
cctccttaccatccctccct

SEQ ID NO: 1950 - RNA, 20 nt, synthetic construct
  source 1..20: mol_type = other RNA
cctccttaccattccccttc

SEQ ID NO: 1951 - RNA, 20 nt, synthetic construct
  source 1..20: mol_type = other RNA
cctccttcaggttccgtctt

SEQ ID NO: 1952 - RNA, 20 nt, synthetic construct
  source 1..20: mol_type = other RNA
cctcgacttcccctcttccg

SEQ ID NO: 1953 - RNA, 20 nt, synthetic construct
  source 1..20: mol_type = other RNA
cctctaacgctgccgtctct

SEQ ID NO: 1954 - RNA, 20 nt, synthetic construct
  source 1..20: mol_type = other RNA
cctctacggctggcccagat

SEQ ID NO: 1955 - RNA, 20 nt, synthetic construct
  source 1..20: mol_type = other RNA
cctctcactcctttcatttg

SEQ ID NO: 1956 - RNA, 20 nt, synthetic construct
  source 1..20: mol_type = other RNA
cctctccatcctcttgcttt

SEQ ID NO: 1957 - RNA, 20 nt, synthetic construct
  source 1..20: mol_type = other RNA
cctctccgggcatctctcct

SEQ ID NO: 1958 - RNA, 20 nt, synthetic construct
  source 1..20: mol_type = other RNA
cctctcctgaacctgagcca

SEQ ID NO: 1959 - RNA, 20 nt, synthetic construct
  source 1..20: mol_type = other RNA
cctctcgcccccgagtgccc

SEQ ID NO: 1960 - RNA, 20 nt, synthetic construct
  source 1..20: mol_type = other RNA
cctctgagcggatcctcccc

SEQ ID NO: 1961 - RNA, 20 nt, synthetic construct
  source 1..20: mol_type = other RNA
cctctggcccactgtttccc

SEQ ID NO: 1962 - RNA, 20 nt, synthetic construct
  source 1..20: mol_type = other RNA
cctcttccccttgctctctg

SEQ ID NO: 1963 - RNA, 20 nt, synthetic construct
  source 1..20: mol_type = other RNA
cctcttccgatgttgagccc

SEQ ID NO: 1964 - RNA, 20 nt, synthetic construct
  source 1..20: mol_type = other RNA
cctcttgctttctttgcctg

SEQ ID NO: 1965 - RNA, 20 nt, synthetic construct
  source 1..20: mol_type = other RNA
cctgaacctgagccagctcc

SEQ ID NO: 1966 - RNA, 20 nt, synthetic construct
  source 1..20: mol_type = other RNA
cctgaaggaggcggcaggga

SEQ ID NO: 1967 - RNA, 20 nt, synthetic construct
  source 1..20: mol_type = other RNA
cctgagccagctcccatagc

SEQ ID NO: 1968 - RNA, 20 nt, synthetic construct
  source 1..20: mol_type = other RNA
cctgagtccggaccactttg

SEQ ID NO: 1969 - RNA, 20 nt, synthetic construct
  source 1..20: mol_type = other RNA
cctgcatcatcaccgttttt

SEQ ID NO: 1970 - RNA, 20 nt, synthetic construct
  source 1..20: mol_type = other RNA
cctgcattctctcccctggg

SEQ ID NO: 1971 - RNA, 20 nt, synthetic construct
  source 1..20: mol_type = other RNA
cctgccctctcctgaacctg

SEQ ID NO: 1972 - RNA, 20 nt, synthetic construct
  source 1..20: mol_type = other RNA
cctgccctgccctctcctga

SEQ ID NO: 1973 - RNA, 20 nt, synthetic construct
  source 1..20: mol_type = other RNA
cctgccgcctccttcaggtt

SEQ ID NO: 1974 - RNA, 20 nt, synthetic construct
  source 1..20: mol_type = other RNA
cctgcctgggaaggggaaac

SEQ ID NO: 1975 - RNA, 20 nt, synthetic construct
  source 1..20: mol_type = other RNA
cctgctttctctgacctgca

SEQ ID NO: 1976 - RNA, 20 nt, synthetic construct
  source 1..20: mol_type = other RNA
cctggacaccccgttctcct

SEQ ID NO: 1977 - RNA, 20 nt, synthetic construct
  source 1..20: mol_type = other RNA
cctggactttgtctccttcc

SEQ ID NO: 1978 - RNA, 20 nt, synthetic construct
  source 1..20: mol_type = other RNA
cctggccattgtcactttgc

SEQ ID NO: 1979 - RNA, 20 nt, synthetic construct
  source 1..20: mol_type = other RNA
cctggccctggccattgtca

SEQ ID NO: 1980 - RNA, 20 nt, synthetic construct
  source 1..20: mol_type = other RNA
cctggccctgggctttgcca

SEQ ID NO: 1981 - RNA, 20 nt, synthetic construct
  source 1..20: mol_type = other RNA
cctggctttagccacctctc

SEQ ID NO: 1982 - RNA, 20 nt, synthetic construct
  source 1..20: mol_type = other RNA
cctggctttggcagcctgtg

SEQ ID NO: 1983 - RNA, 20 nt, synthetic construct
  source 1..20: mol_type = other RNA
cctgggaaggggaaacagtg

SEQ ID NO: 1984 - RNA, 20 nt, synthetic construct
  source 1..20: mol_type = other RNA
cctgggcctgtgccgctttc

SEQ ID NO: 1985 - RNA, 20 nt, synthetic construct
  source 1..20: mol_type = other RNA
cctgggcttagccactctgt

SEQ ID NO: 1986 - RNA, 20 nt, synthetic construct
  source 1..20: mol_type = other RNA
cctgggctttgccaccctat

SEQ ID NO: 1987 - RNA, 20 nt, synthetic construct
  source 1..20: mol_type = other RNA
cctggggcagagtggtcagc

SEQ ID NO: 1988 - RNA, 20 nt, synthetic construct
  source 1..20: mol_type = other RNA
cctgggtcacctctacggct

SEQ ID NO: 1989 - RNA, 20 nt, synthetic construct
  source 1..20: mol_type = other RNA
cctgtgccatctctcgtttc

SEQ ID NO: 1990 - RNA, 20 nt, synthetic construct
  source 1..20: mol_type = other RNA
cctgtgccgctttctgtctg

SEQ ID NO: 1991 - RNA, 20 nt, synthetic construct
  source 1..20: mol_type = other RNA
cctgtgctgacccatgcagt

SEQ ID NO: 1992 - RNA, 20 nt, synthetic construct
  source 1..20: mol_type = other RNA
cctgtggattcgggtcacct

SEQ ID NO: 1993 - RNA, 20 nt, synthetic construct
  source 1..20: mol_type = other RNA
ccttaccatccctccctcga

SEQ ID NO: 1994 - RNA, 20 nt, synthetic construct
  source 1..20: mol_type = other RNA
ccttaccattccccttcgac

SEQ ID NO: 1995 - RNA, 20 nt, synthetic construct
  source 1..20: mol_type = other RNA
ccttcaggttccgtcttcct

SEQ ID NO: 1996 - RNA, 20 nt, synthetic construct
  source 1..20: mol_type = other RNA
ccttcccaggcaggtcctgc

SEQ ID NO: 1997 - RNA, 20 nt, synthetic construct
  source 1..20: mol_type = other RNA
ccttccctgccctgccctct

SEQ ID NO: 1998 - RNA, 20 nt, synthetic construct
  source 1..20: mol_type = other RNA
ccttccctgccgcctccttc

SEQ ID NO: 1999 - RNA, 20 nt, synthetic construct
  source 1..20: mol_type = other RNA
ccttcgaccaccccacttcc

SEQ ID NO: 2000 - RNA, 20 nt, synthetic construct
  source 1..20: mol_type = other RNA
ccttcgacctactctcttcc

SEQ ID NO: 2001 - RNA, 20 nt, synthetic construct
  source 1..20: mol_type = other RNA
ccttctccgacggatgtctc

SEQ ID NO: 2002 - RNA, 20 nt, synthetic construct
  source 1..20: mol_type = other RNA
ccttctccttctggggcctg

SEQ ID NO: 2003 - RNA, 20 nt, synthetic construct
  source 1..20: mol_type = other RNA
ccttctcggcgctgcaccac

SEQ ID NO: 2004 - RNA, 20 nt, synthetic construct
  source 1..20: mol_type = other RNA
ccttctggggcctgtgccat

SEQ ID NO: 2005 - RNA, 20 nt, synthetic construct
  source 1..20: mol_type = other RNA
ccttcttgtaggcctgcatc

SEQ ID NO: 2006 - RNA, 20 nt, synthetic construct
  source 1..20: mol_type = other RNA
ccttgcgtcccgcctcccct

SEQ ID NO: 2007 - RNA, 20 nt, synthetic construct
  source 1..20: mol_type = other RNA
ccttgctctctgctgtgttg

SEQ ID NO: 2008 - RNA, 20 nt, synthetic construct
  source 1..20: mol_type = other RNA
ccttgctgtgccgccggaac

SEQ ID NO: 2009 - RNA, 20 nt, synthetic construct
  source 1..20: mol_type = other RNA
ccttgggcagcaacacagca

SEQ ID NO: 2010 - RNA, 20 nt, synthetic construct
  source 1..20: mol_type = other RNA
cctttcatttgggcagctcc

SEQ ID NO: 2011 - RNA, 20 nt, synthetic construct
  source 1..20: mol_type = other RNA
ccttttccttctccttctgg

SEQ ID NO: 2012 - RNA, 20 nt, synthetic construct
  source 1..20: mol_type = other RNA
cgaaggggaatggtaaggag

SEQ ID NO: 2013 - RNA, 20 nt, synthetic construct
  source 1..20: mol_type = other RNA
cgaaggggaatggtaagggg

SEQ ID NO: 2014 - RNA, 20 nt, synthetic construct
  source 1..20: mol_type = other RNA
cgaatccacaggagaacggg

SEQ ID NO: 2015 - RNA, 20 nt, synthetic construct
  source 1..20: mol_type = other RNA
cgaattggagccgcttcaac

SEQ ID NO: 2016 - RNA, 20 nt, synthetic construct
  source 1..20: mol_type = other RNA
cgaccaccccacttccgaat

SEQ ID NO: 2017 - RNA, 20 nt, synthetic construct
  source 1..20: mol_type = other RNA
cgacctactctcttccgcat

SEQ ID NO: 2018 - RNA, 20 nt, synthetic construct
  source 1..20: mol_type = other RNA
cgacggatgtctcccttgcg

SEQ ID NO: 2019 - RNA, 20 nt, synthetic construct
  source 1..20: mol_type = other RNA
cgactccaatgcggaagaga

SEQ ID NO: 2020 - RNA, 20 nt, synthetic construct
  source 1..20: mol_type = other RNA
cgacttcccctcttccgatg

SEQ ID NO: 2021 - RNA, 20 nt, synthetic construct
  source 1..20: mol_type = other RNA
cgagaaggaagtgctccgga

SEQ ID NO: 2022 - RNA, 20 nt, synthetic construct
  source 1..20: mol_type = other RNA
cgagagatggcacaggcccc

SEQ ID NO: 2023 - RNA, 20 nt, synthetic construct
  source 1..20: mol_type = other RNA
cgagaggagggcagcgcaaa

SEQ ID NO: 2024 - RNA, 20 nt, synthetic construct
  source 1..20: mol_type = other RNA
cgagggagggatggtaagga

SEQ ID NO: 2025 - RNA, 20 nt, synthetic construct
  source 1..20: mol_type = other RNA
cgagtgaagacggcatgggg

SEQ ID NO: 2026 - RNA, 20 nt, synthetic construct
  source 1..20: mol_type = other RNA
cgagtgcccttgctgtgccg

SEQ ID NO: 2027 - RNA, 20 nt, synthetic construct
  source 1..20: mol_type = other RNA
cgatgttgagcccctccagc

SEQ ID NO: 2028 - RNA, 20 nt, synthetic construct
  source 1..20: mol_type = other RNA
cgcaaagtgacaatggccag

SEQ ID NO: 2029 - RNA, 20 nt, synthetic construct
  source 1..20: mol_type = other RNA
cgcaagggagacatccgtcg

SEQ ID NO: 2030 - RNA, 20 nt, synthetic construct
  source 1..20: mol_type = other RNA
cgcagaagccagtagagctc

SEQ ID NO: 2031 - RNA, 20 nt, synthetic construct
  source 1..20: mol_type = other RNA
cgcattggagtcgctttaac

SEQ ID NO: 2032 - RNA, 20 nt, synthetic construct
  source 1..20: mol_type = other RNA
cgcccccgagtgcccttgct

SEQ ID NO: 2033 - RNA, 20 nt, synthetic construct
  source 1..20: mol_type = other RNA
cgccccgtcgttcctggccc

SEQ ID NO: 2034 - RNA, 20 nt, synthetic construct
  source 1..20: mol_type = other RNA
cgccgagaaggaagtgctcc

SEQ ID NO: 2035 - RNA, 20 nt, synthetic construct
  source 1..20: mol_type = other RNA
cgccgcctctggcccactgt

SEQ ID NO: 2036 - RNA, 20 nt, synthetic construct
  source 1..20: mol_type = other RNA
cgccggaactctgccctcta

SEQ ID NO: 2037 - RNA, 20 nt, synthetic construct
  source 1..20: mol_type = other RNA
cgcctccccttcttgtaggc

SEQ ID NO: 2038 - RNA, 20 nt, synthetic construct
  source 1..20: mol_type = other RNA
cgcctccttcaggttccgtc

SEQ ID NO: 2039 - RNA, 20 nt, synthetic construct
  source 1..20: mol_type = other RNA
cgcctctggcccactgtttc

SEQ ID NO: 2040 - RNA, 20 nt, synthetic construct
  source 1..20: mol_type = other RNA
cgctcagaggacatcacgtg

SEQ ID NO: 2041 - RNA, 20 nt, synthetic construct
  source 1..20: mol_type = other RNA
cgctgcaccacgtgatgtcc

SEQ ID NO: 2042 - RNA, 20 nt, synthetic construct
  source 1..20: mol_type = other RNA
cgctgccctcctctcgcccc

SEQ ID NO: 2043 - RNA, 20 nt, synthetic construct
  source 1..20: mol_type = other RNA
cgctgccgtctctctcctga

SEQ ID NO: 2044 - RNA, 20 nt, synthetic construct
  source 1..20: mol_type = other RNA
cgctgggttcccttttcctt

SEQ ID NO: 2045 - RNA, 20 nt, synthetic construct
  source 1..20: mol_type = other RNA
cgcttcaactggccctgggc

SEQ ID NO: 2046 - RNA, 20 nt, synthetic construct
  source 1..20: mol_type = other RNA
cgctttaactggccctggct

SEQ ID NO: 2047 - RNA, 20 nt, synthetic construct
  source 1..20: mol_type = other RNA
cgctttctgtctgcagcttg

SEQ ID NO: 2048 - RNA, 20 nt, synthetic construct
  source 1..20: mol_type = other RNA
cggaaagagcatccttgggc

SEQ ID NO: 2049 - RNA, 20 nt, synthetic construct
  source 1..20: mol_type = other RNA
cggaacctgaaggaggcggc

SEQ ID NO: 2050 - RNA, 20 nt, synthetic construct
  source 1..20: mol_type = other RNA
cggaactctgccctctaacg

SEQ ID NO: 2051 - RNA, 20 nt, synthetic construct
  source 1..20: mol_type = other RNA
cggaagagagtaggtcgaag

SEQ ID NO: 2052 - RNA, 20 nt, synthetic construct
  source 1..20: mol_type = other RNA
cggaagaggggaagtcgagg

SEQ ID NO: 2053 - RNA, 20 nt, synthetic construct
  source 1..20: mol_type = other RNA
cggaagtggggtggtcgaag

SEQ ID NO: 2054 - RNA, 20 nt, synthetic construct
  source 1..20: mol_type = other RNA
cggaccactttgagctctac

SEQ ID NO: 2055 - RNA, 20 nt, synthetic construct
  source 1..20: mol_type = other RNA
cggactcaggagagagacgg

SEQ ID NO: 2056 - RNA, 20 nt, synthetic construct
  source 1..20: mol_type = other RNA
cggagaaggccatcctaaga

SEQ ID NO: 2057 - RNA, 20 nt, synthetic construct
  source 1..20: mol_type = other RNA
cggagaggacccagacacgg

SEQ ID NO: 2058 - RNA, 20 nt, synthetic construct
  source 1..20: mol_type = other RNA
cggagcacttccttctcggc

SEQ ID NO: 2059 - RNA, 20 nt, synthetic construct
  source 1..20: mol_type = other RNA
cggatcctccccgtgtctgg

SEQ ID NO: 2060 - RNA, 20 nt, synthetic construct
  source 1..20: mol_type = other RNA
cggatgtctcccttgcgtcc

SEQ ID NO: 2061 - RNA, 20 nt, synthetic construct
  source 1..20: mol_type = other RNA
cggcacagcaagggcactcg

SEQ ID NO: 2062 - RNA, 20 nt, synthetic construct
  source 1..20: mol_type = other RNA
cggcacaggcccaggggaga

SEQ ID NO: 2063 - RNA, 20 nt, synthetic construct
  source 1..20: mol_type = other RNA
cggcagcgttagagggcaga

SEQ ID NO: 2064 - RNA, 20 nt, synthetic construct
  source 1..20: mol_type = other RNA
cggcagggaaggatctgggc

SEQ ID NO: 2065 - RNA, 20 nt, synthetic construct
  source 1..20: mol_type = other RNA
cggcatggggttgggtgagg

SEQ ID NO: 2066 - RNA, 20 nt, synthetic construct
  source 1..20: mol_type = other RNA
cggcgcagaagccagtagag

SEQ ID NO: 2067 - RNA, 20 nt, synthetic construct
  source 1..20: mol_type = other RNA
cggcgctgcaccacgtgatg

SEQ ID NO: 2068 - RNA, 20 nt, synthetic construct
  source 1..20: mol_type = other RNA
cggcggcacagcaagggcac

SEQ ID NO: 2069 - RNA, 20 nt, synthetic construct
  source 1..20: mol_type = other RNA
cggctccaattcggaagtgg

SEQ ID NO: 2070 - RNA, 20 nt, synthetic construct
  source 1..20: mol_type = other RNA
cggctggaggggctcaacat

SEQ ID NO: 2071 - RNA, 20 nt, synthetic construct
  source 1..20: mol_type = other RNA
cggctggcccagatccttcc

SEQ ID NO: 2072 - RNA, 20 nt, synthetic construct
  source 1..20: mol_type = other RNA
cgggacgcaagggagacatc

SEQ ID NO: 2073 - RNA, 20 nt, synthetic construct
  source 1..20: mol_type = other RNA
cgggcatctctcctccctca

SEQ ID NO: 2074 - RNA, 20 nt, synthetic construct
  source 1..20: mol_type = other RNA
cggggaggatccgctcagag

SEQ ID NO: 2075 - RNA, 20 nt, synthetic construct
  source 1..20: mol_type = other RNA
cgggggcgagaggagggcag

SEQ ID NO: 2076 - RNA, 20 nt, synthetic construct
  source 1..20: mol_type = other RNA
cggggtactttggggttgtc

SEQ ID NO: 2077 - RNA, 20 nt, synthetic construct
  source 1..20: mol_type = other RNA
cggggtgtcagcatagggtg

SEQ ID NO: 2078 - RNA, 20 nt, synthetic construct
  source 1..20: mol_type = other RNA
cggggtgtccaggcaaagaa

SEQ ID NO: 2079 - RNA, 20 nt, synthetic construct
  source 1..20: mol_type = other RNA
cgggtcacctctcactcctt

SEQ ID NO: 2080 - RNA, 20 nt, synthetic construct
  source 1..20: mol_type = other RNA
cggtcctggactttgtctcc

SEQ ID NO: 2081 - RNA, 20 nt, synthetic construct
  source 1..20: mol_type = other RNA
cggtgatgatgcaggcctac

SEQ ID NO: 2082 - RNA, 20 nt, synthetic construct
  source 1..20: mol_type = other RNA
cgtagaggtgacccaggcca

SEQ ID NO: 2083 - RNA, 20 nt, synthetic construct
  source 1..20: mol_type = other RNA
cgtcccagtcccccttacca

SEQ ID NO: 2084 - RNA, 20 nt, synthetic construct
  source 1..20: mol_type = other RNA
cgtcccgcctccccttcttg

SEQ ID NO: 2085 - RNA, 20 nt, synthetic construct
  source 1..20: mol_type = other RNA
cgtcggagaaggccatccta

SEQ ID NO: 2086 - RNA, 20 nt, synthetic construct
  source 1..20: mol_type = other RNA
cgtcgttcctggccctgggc

SEQ ID NO: 2087 - RNA, 20 nt, synthetic construct
  source 1..20: mol_type = other RNA
cgtctccctggctttagcca

SEQ ID NO: 2088 - RNA, 20 nt, synthetic construct
  source 1..20: mol_type = other RNA
cgtctctctcctgagtccgg

SEQ ID NO: 2089 - RNA, 20 nt, synthetic construct
  source 1..20: mol_type = other RNA
cgtcttcactcgctgggttc

SEQ ID NO: 2090 - RNA, 20 nt, synthetic construct
  source 1..20: mol_type = other RNA
cgtcttcctccactccctct

SEQ ID NO: 2091 - RNA, 20 nt, synthetic construct
  source 1..20: mol_type = other RNA
cgtgatgtcctctgagcgga

SEQ ID NO: 2092 - RNA, 20 nt, synthetic construct
  source 1..20: mol_type = other RNA
cgtggtgcagcgccgagaag

SEQ ID NO: 2093 - RNA, 20 nt, synthetic construct
  source 1..20: mol_type = other RNA
cgtgtctgggtcctctccgg

SEQ ID NO: 2094 - RNA, 20 nt, synthetic construct
  source 1..20: mol_type = other RNA
cgttagagggcagagttccg

SEQ ID NO: 2095 - RNA, 20 nt, synthetic construct
  source 1..20: mol_type = other RNA
cgttcctggccctgggcttt

SEQ ID NO: 2096 - RNA, 20 nt, synthetic construct
  source 1..20: mol_type = other RNA
cgttctcctgtggattcggg

SEQ ID NO: 2097 - RNA, 20 nt, synthetic construct
  source 1..20: mol_type = other RNA
cgtttcttaggatggccttc

SEQ ID NO: 2098 - RNA, 20 nt, synthetic construct
  source 1..20: mol_type = other RNA
cgtttttctggacaacccca

SEQ ID NO: 2099 - RNA, 20 nt, synthetic construct
  source 1..20: mol_type = other RNA
ctaaagccagggagacgggg

SEQ ID NO: 2100 - RNA, 20 nt, synthetic construct
  source 1..20: mol_type = other RNA
ctaacgctgccgtctctctc

SEQ ID NO: 2101 - RNA, 20 nt, synthetic construct
  source 1..20: mol_type = other RNA
ctaagaaacgagagatggca

SEQ ID NO: 2102 - RNA, 20 nt, synthetic construct
  source 1..20: mol_type = other RNA
ctaagcccagggccagttga

SEQ ID NO: 2103 - RNA, 20 nt, synthetic construct
  source 1..20: mol_type = other RNA
ctacaagaaggggaggcggg

SEQ ID NO: 2104 - RNA, 20 nt, synthetic construct
  source 1..20: mol_type = other RNA
ctaccccccttacctctcta

SEQ ID NO: 2105 - RNA, 20 nt, synthetic construct
  source 1..20: mol_type = other RNA
ctacggctggcccagatcct

SEQ ID NO: 2106 - RNA, 20 nt, synthetic construct
  source 1..20: mol_type = other RNA
ctactctcttccgcattgga

SEQ ID NO: 2107 - RNA, 20 nt, synthetic construct
  source 1..20: mol_type = other RNA
ctactggcttctgcgccgcc

SEQ ID NO: 2108 - RNA, 20 nt, synthetic construct
  source 1..20: mol_type = other RNA
ctagagaggtaaggggggta

SEQ ID NO: 2109 - RNA, 20 nt, synthetic construct
  source 1..20: mol_type = other RNA
ctagcacagactagagaggt

SEQ ID NO: 2110 - RNA, 20 nt, synthetic construct
  source 1..20: mol_type = other RNA
ctatctgcctggccctggcc

SEQ ID NO: 2111 - RNA, 20 nt, synthetic construct
  source 1..20: mol_type = other RNA
ctatgctgacaccccgtccc

SEQ ID NO: 2112 - RNA, 20 nt, synthetic construct
  source 1..20: mol_type = other RNA
ctatgggagctggctcaggt

SEQ ID NO: 2113 - RNA, 20 nt, synthetic construct
  source 1..20: mol_type = other RNA
ctcaaagtggtccggactca

SEQ ID NO: 2114 - RNA, 20 nt, synthetic construct
  source 1..20: mol_type = other RNA
ctcaacatcggaagagggga

SEQ ID NO: 2115 - RNA, 20 nt, synthetic construct
  source 1..20: mol_type = other RNA
ctcacccaaccccatgccgt

SEQ ID NO: 2116 - RNA, 20 nt, synthetic construct
  source 1..20: mol_type = other RNA
ctcactcctttcatttgggc

SEQ ID NO: 2117 - RNA, 20 nt, synthetic construct
  source 1..20: mol_type = other RNA
ctcagaggacatcacgtggt

SEQ ID NO: 2118 - RNA, 20 nt, synthetic construct
  source 1..20: mol_type = other RNA
ctcaggagagagacggcagc

SEQ ID NO: 2119 - RNA, 20 nt, synthetic construct
  source 1..20: mol_type = other RNA
ctcaggttcaggagagggca

SEQ ID NO: 2120 - RNA, 20 nt, synthetic construct
  source 1..20: mol_type = other RNA
ctcagtctggtctatctgcc

SEQ ID NO: 2121 - RNA, 20 nt, synthetic construct
  source 1..20: mol_type = other RNA
ctccaatgcggaagagagta

SEQ ID NO: 2122 - RNA, 20 nt, synthetic construct
  source 1..20: mol_type = other RNA
ctccaattcggaagtggggt

SEQ ID NO: 2123 - RNA, 20 nt, synthetic construct
  source 1..20: mol_type = other RNA
ctccactccctcttcccctt

SEQ ID NO: 2124 - RNA, 20 nt, synthetic construct
  source 1..20: mol_type = other RNA
ctccagccggtcctggactt

SEQ ID NO: 2125 - RNA, 20 nt, synthetic construct
  source 1..20: mol_type = other RNA
ctccatcctcttgctttctt

SEQ ID NO: 2126 - RNA, 20 nt, synthetic construct
  source 1..20: mol_type = other RNA
ctcccatagctcagtctggt

SEQ ID NO: 2127 - RNA, 20 nt, synthetic construct
  source 1..20: mol_type = other RNA
ctccccgtgtctgggtcctc

SEQ ID NO: 2128 - RNA, 20 nt, synthetic construct
  source 1..20: mol_type = other RNA
ctcccctaccccccttacct

SEQ ID NO: 2129 - RNA, 20 nt, synthetic construct
  source 1..20: mol_type = other RNA
ctcccctgggcctgtgccgc

SEQ ID NO: 2130 - RNA, 20 nt, synthetic construct
  source 1..20: mol_type = other RNA
ctccccttcttgtaggcctg

SEQ ID NO: 2131 - RNA, 20 nt, synthetic construct
  source 1..20: mol_type = other RNA
ctccctcacccaaccccatg

SEQ ID NO: 2132 - RNA, 20 nt, synthetic construct
  source 1..20: mol_type = other RNA
ctccctcgacttcccctctt

SEQ ID NO: 2133 - RNA, 20 nt, synthetic construct
  source 1..20: mol_type = other RNA
ctccctcttccccttgctct

SEQ ID NO: 2134 - RNA, 20 nt, synthetic construct
  source 1..20: mol_type = other RNA
ctccctggctttagccacct

SEQ ID NO: 2135 - RNA, 20 nt, synthetic construct
  source 1..20: mol_type = other RNA
ctcccttgcgtcccgcctcc

SEQ ID NO: 2136 - RNA, 20 nt, synthetic construct
  source 1..20: mol_type = other RNA
ctccgacggatgtctccctt

SEQ ID NO: 2137 - RNA, 20 nt, synthetic construct
  source 1..20: mol_type = other RNA
ctccggaaagagcatccttg

SEQ ID NO: 2138 - RNA, 20 nt, synthetic construct
  source 1..20: mol_type = other RNA
ctccgggcatctctcctccc

SEQ ID NO: 2139 - RNA, 20 nt, synthetic construct
  source 1..20: mol_type = other RNA
ctcctccctcacccaacccc

SEQ ID NO: 2140 - RNA, 20 nt, synthetic construct
  source 1..20: mol_type = other RNA
ctcctctcgcccccgagtgc

SEQ ID NO: 2141 - RNA, 20 nt, synthetic construct
  source 1..20: mol_type = other RNA
ctcctgaacctgagccagct

SEQ ID NO: 2142 - RNA, 20 nt, synthetic construct
  source 1..20: mol_type = other RNA
ctcctgagtccggaccactt

SEQ ID NO: 2143 - RNA, 20 nt, synthetic construct
  source 1..20: mol_type = other RNA
ctcctgtggattcgggtcac

SEQ ID NO: 2144 - RNA, 20 nt, synthetic construct
  source 1..20: mol_type = other RNA
ctccttaccatccctccctc

SEQ ID NO: 2145 - RNA, 20 nt, synthetic construct
  source 1..20: mol_type = other RNA
ctccttaccattccccttcg

SEQ ID NO: 2146 - RNA, 20 nt, synthetic construct
  source 1..20: mol_type = other RNA
ctccttcaggttccgtcttc

SEQ ID NO: 2147 - RNA, 20 nt, synthetic construct
  source 1..20: mol_type = other RNA
ctccttccctgccctgccct

SEQ ID NO: 2148 - RNA, 20 nt, synthetic construct
  source 1..20: mol_type = other RNA
ctccttctggggcctgtgcc

SEQ ID NO: 2149 - RNA, 20 nt, synthetic construct
  source 1..20: mol_type = other RNA
ctcctttcatttgggcagct

SEQ ID NO: 2150 - RNA, 20 nt, synthetic construct
  source 1..20: mol_type = other RNA
ctcgacttcccctcttccga

SEQ ID NO: 2151 - RNA, 20 nt, synthetic construct
  source 1..20: mol_type = other RNA
ctcgcccccgagtgcccttg

SEQ ID NO: 2152 - RNA, 20 nt, synthetic construct
  source 1..20: mol_type = other RNA
ctcgctgggttcccttttcc

SEQ ID NO: 2153 - RNA, 20 nt, synthetic construct
  source 1..20: mol_type = other RNA
ctcggcgctgcaccacgtga

SEQ ID NO: 2154 - RNA, 20 nt, synthetic construct
  source 1..20: mol_type = other RNA
ctcgggggcgagaggagggc

SEQ ID NO: 2155 - RNA, 20 nt, synthetic construct
  source 1..20: mol_type = other RNA
ctcgtttcttaggatggcct

SEQ ID NO: 2156 - RNA, 20 nt, synthetic construct
  source 1..20: mol_type = other RNA
ctctaacgctgccgtctctc

SEQ ID NO: 2157 - RNA, 20 nt, synthetic construct
  source 1..20: mol_type = other RNA
ctctacggctggcccagatc

SEQ ID NO: 2158 - RNA, 20 nt, synthetic construct
  source 1..20: mol_type = other RNA
ctctactggcttctgcgccg

SEQ ID NO: 2159 - RNA, 20 nt, synthetic construct
  source 1..20: mol_type = other RNA
ctctcactcctttcatttgg

SEQ ID NO: 2160 - RNA, 20 nt, synthetic construct
  source 1..20: mol_type = other RNA
ctctccatcctcttgctttc

SEQ ID NO: 2161 - RNA, 20 nt, synthetic construct
  source 1..20: mol_type = other RNA
ctctcccctgggcctgtgcc

SEQ ID NO: 2162 - RNA, 20 nt, synthetic construct
  source 1..20: mol_type = other RNA
ctctccgggcatctctcctc

SEQ ID NO: 2163 - RNA, 20 nt, synthetic construct
  source 1..20: mol_type = other RNA
ctctcctccctcacccaacc

SEQ ID NO: 2164 - RNA, 20 nt, synthetic construct
  source 1..20: mol_type = other RNA
ctctcctgaacctgagccag

SEQ ID NO: 2165 - RNA, 20 nt, synthetic construct
  source 1..20: mol_type = other RNA
ctctcctgagtccggaccac

SEQ ID NO: 2166 - RNA, 20 nt, synthetic construct
  source 1..20: mol_type = other RNA
ctctcgcccccgagtgccct

SEQ ID NO: 2167 - RNA, 20 nt, synthetic construct
  source 1..20: mol_type = other RNA
ctctcgtttcttaggatggc

SEQ ID NO: 2168 - RNA, 20 nt, synthetic construct
  source 1..20: mol_type = other RNA
ctctctcctgagtccggacc

SEQ ID NO: 2169 - RNA, 20 nt, synthetic construct
  source 1..20: mol_type = other RNA
ctctctgctgtgttgctgcc

SEQ ID NO: 2170 - RNA, 20 nt, synthetic construct
  source 1..20: mol_type = other RNA
ctctcttccgcattggagtc

SEQ ID NO: 2171 - RNA, 20 nt, synthetic construct
  source 1..20: mol_type = other RNA
ctctgacctgcattctctcc

SEQ ID NO: 2172 - RNA, 20 nt, synthetic construct
  source 1..20: mol_type = other RNA
ctctgagcggatcctccccg

SEQ ID NO: 2173 - RNA, 20 nt, synthetic construct
  source 1..20: mol_type = other RNA
ctctgccccaggcctcctta

SEQ ID NO: 2174 - RNA, 20 nt, synthetic construct
  source 1..20: mol_type = other RNA
ctctgccctctaacgctgcc

SEQ ID NO: 2175 - RNA, 20 nt, synthetic construct
  source 1..20: mol_type = other RNA
ctctgctgtgttgctgccca

SEQ ID NO: 2176 - RNA, 20 nt, synthetic construct
  source 1..20: mol_type = other RNA
ctctggcccactgtttcccc

SEQ ID NO: 2177 - RNA, 20 nt, synthetic construct
  source 1..20: mol_type = other RNA
ctctgtgctgaccactctgc

SEQ ID NO: 2178 - RNA, 20 nt, synthetic construct
  source 1..20: mol_type = other RNA
ctcttccccttgctctctgc

SEQ ID NO: 2179 - RNA, 20 nt, synthetic construct
  source 1..20: mol_type = other RNA
ctcttccgatgttgagcccc

SEQ ID NO: 2180 - RNA, 20 nt, synthetic construct
  source 1..20: mol_type = other RNA
ctcttccgcattggagtcgc

SEQ ID NO: 2181 - RNA, 20 nt, synthetic construct
  source 1..20: mol_type = other RNA
ctcttgctttctttgcctgg

SEQ ID NO: 2182 - RNA, 20 nt, synthetic construct
  source 1..20: mol_type = other RNA
ctctttccggagcacttcct

SEQ ID NO: 2183 - RNA, 20 nt, synthetic construct
  source 1..20: mol_type = other RNA
ctgaacctgagccagctccc

SEQ ID NO: 2184 - RNA, 20 nt, synthetic construct
  source 1..20: mol_type = other RNA
ctgaaggaggcggcagggaa

SEQ ID NO: 2185 - RNA, 20 nt, synthetic construct
  source 1..20: mol_type = other RNA
ctgacaccccgtcccagtcc

SEQ ID NO: 2186 - RNA, 20 nt, synthetic construct
  source 1..20: mol_type = other RNA
ctgaccactctgccccaggc

SEQ ID NO: 2187 - RNA, 20 nt, synthetic construct
  source 1..20: mol_type = other RNA
ctgacccatgcagtcctcct

SEQ ID NO: 2188 - RNA, 20 nt, synthetic construct
  source 1..20: mol_type = other RNA
ctgacctgcattctctcccc

SEQ ID NO: 2189 - RNA, 20 nt, synthetic construct
  source 1..20: mol_type = other RNA
ctgagccagctcccatagct

SEQ ID NO: 2190 - RNA, 20 nt, synthetic construct
  source 1..20: mol_type = other RNA
ctgagcggatcctccccgtg

SEQ ID NO: 2191 - RNA, 20 nt, synthetic construct
  source 1..20: mol_type = other RNA
ctgagctatgggagctggct

SEQ ID NO: 2192 - RNA, 20 nt, synthetic construct
  source 1..20: mol_type = other RNA
ctgagtccggaccactttga

SEQ ID NO: 2193 - RNA, 20 nt, synthetic construct
  source 1..20: mol_type = other RNA
ctgcaccacgtgatgtcctc

SEQ ID NO: 2194 - RNA, 20 nt, synthetic construct
  source 1..20: mol_type = other RNA
ctgcagacagaaagcggcac

SEQ ID NO: 2195 - RNA, 20 nt, synthetic construct
  source 1..20: mol_type = other RNA
ctgcagcttgtggcctgggt

SEQ ID NO: 2196 - RNA, 20 nt, synthetic construct
  source 1..20: mol_type = other RNA
ctgcatcatcaccgtttttc

SEQ ID NO: 2197 - RNA, 20 nt, synthetic construct
  source 1..20: mol_type = other RNA
ctgcatgggtcagcacaggc

SEQ ID NO: 2198 - RNA, 20 nt, synthetic construct
  source 1..20: mol_type = other RNA
ctgcattctctcccctgggc

SEQ ID NO: 2199 - RNA, 20 nt, synthetic construct
  source 1..20: mol_type = other RNA
ctgccaaagccagggccagt

SEQ ID NO: 2200 - RNA, 20 nt, synthetic construct
  source 1..20: mol_type = other RNA
ctgcccaaatgaaaggagtg

SEQ ID NO: 2201 - RNA, 20 nt, synthetic construct
  source 1..20: mol_type = other RNA
ctgcccaaggatgctctttc

SEQ ID NO: 2202 - RNA, 20 nt, synthetic construct
  source 1..20: mol_type = other RNA
ctgccccaggcctccttacc

SEQ ID NO: 2203 - RNA, 20 nt, synthetic construct
  source 1..20: mol_type = other RNA
ctgccctcctctcgcccccg

SEQ ID NO: 2204 - RNA, 20 nt, synthetic construct
  source 1..20: mol_type = other RNA
ctgccctctaacgctgccgt

SEQ ID NO: 2205 - RNA, 20 nt, synthetic construct
  source 1..20: mol_type = other RNA
ctgccctctcctgaacctga

SEQ ID NO: 2206 - RNA, 20 nt, synthetic construct
  source 1..20: mol_type = other RNA
ctgccctgccctctcctgaa

SEQ ID NO: 2207 - RNA, 20 nt, synthetic construct
  source 1..20: mol_type = other RNA
ctgccgcctccttcaggttc

SEQ ID NO: 2208 - RNA, 20 nt, synthetic construct
  source 1..20: mol_type = other RNA
ctgccgtctctctcctgagt

SEQ ID NO: 2209 - RNA, 20 nt, synthetic construct
  source 1..20: mol_type = other RNA
ctgcctggccctggccattg

SEQ ID NO: 2210 - RNA, 20 nt, synthetic construct
  source 1..20: mol_type = other RNA
ctgcctgggaaggggaaaca

SEQ ID NO: 2211 - RNA, 20 nt, synthetic construct
  source 1..20: mol_type = other RNA
ctgcgccgcctctggcccac

SEQ ID NO: 2212 - RNA, 20 nt, synthetic construct
  source 1..20: mol_type = other RNA
ctgctgtgttgctgcccaag

SEQ ID NO: 2213 - RNA, 20 nt, synthetic construct
  source 1..20: mol_type = other RNA
ctgctttctctgacctgcat

SEQ ID NO: 2214 - RNA, 20 nt, synthetic construct
  source 1..20: mol_type = other RNA
ctggacaaccccaaagtacc

SEQ ID NO: 2215 - RNA, 20 nt, synthetic construct
  source 1..20: mol_type = other RNA
ctggacaccccgttctcctg

SEQ ID NO: 2216 - RNA, 20 nt, synthetic construct
  source 1..20: mol_type = other RNA
ctggactttgtctccttccc

SEQ ID NO: 2217 - RNA, 20 nt, synthetic construct
  source 1..20: mol_type = other RNA
ctggaggggctcaacatcgg

SEQ ID NO: 2218 - RNA, 20 nt, synthetic construct
  source 1..20: mol_type = other RNA
ctggccattgtcactttgcg

SEQ ID NO: 2219 - RNA, 20 nt, synthetic construct
  source 1..20: mol_type = other RNA
ctggcccactgtttcccctt

SEQ ID NO: 2220 - RNA, 20 nt, synthetic construct
  source 1..20: mol_type = other RNA
ctggcccagatccttccctg

SEQ ID NO: 2221 - RNA, 20 nt, synthetic construct
  source 1..20: mol_type = other RNA
ctggccctggccattgtcac

SEQ ID NO: 2222 - RNA, 20 nt, synthetic construct
  source 1..20: mol_type = other RNA
ctggccctggctttggcagc

SEQ ID NO: 2223 - RNA, 20 nt, synthetic construct
  source 1..20: mol_type = other RNA
ctggccctgggcttagccac

SEQ ID NO: 2224 - RNA, 20 nt, synthetic construct
  source 1..20: mol_type = other RNA
ctggccctgggctttgccac

SEQ ID NO: 2225 - RNA, 20 nt, synthetic construct
  source 1..20: mol_type = other RNA
ctggctcaggttcaggagag

SEQ ID NO: 2226 - RNA, 20 nt, synthetic construct
  source 1..20: mol_type = other RNA
ctggcttctgcgccgcctct

SEQ ID NO: 2227 - RNA, 20 nt, synthetic construct
  source 1..20: mol_type = other RNA
ctggctttagccacctctcc

SEQ ID NO: 2228 - RNA, 20 nt, synthetic construct
  source 1..20: mol_type = other RNA
ctggctttggcagcctgtgc

SEQ ID NO: 2229 - RNA, 20 nt, synthetic construct
  source 1..20: mol_type = other RNA
ctgggaaggggaaacagtgg

SEQ ID NO: 2230 - RNA, 20 nt, synthetic construct
  source 1..20: mol_type = other RNA
ctgggacggggtgtcagcat

SEQ ID NO: 2231 - RNA, 20 nt, synthetic construct
  source 1..20: mol_type = other RNA
ctgggccagccgtagaggtg

SEQ ID NO: 2232 - RNA, 20 nt, synthetic construct
  source 1..20: mol_type = other RNA
ctgggcctgtgccgctttct

SEQ ID NO: 2233 - RNA, 20 nt, synthetic construct
  source 1..20: mol_type = other RNA
ctgggcttagccactctgtg

SEQ ID NO: 2234 - RNA, 20 nt, synthetic construct
  source 1..20: mol_type = other RNA
ctgggctttgccaccctatg

SEQ ID NO: 2235 - RNA, 20 nt, synthetic construct
  source 1..20: mol_type = other RNA
ctggggcagagtggtcagca

SEQ ID NO: 2236 - RNA, 20 nt, synthetic construct
  source 1..20: mol_type = other RNA
ctggggcctgtgccatctct

SEQ ID NO: 2237 - RNA, 20 nt, synthetic construct
  source 1..20: mol_type = other RNA
ctgggtcacctctacggctg

SEQ ID NO: 2238 - RNA, 20 nt, synthetic construct
  source 1..20: mol_type = other RNA
ctgggtcctctccgggcatc

SEQ ID NO: 2239 - RNA, 20 nt, synthetic construct
  source 1..20: mol_type = other RNA
ctgggttcccttttccttct

SEQ ID NO: 2240 - RNA, 20 nt, synthetic construct
  source 1..20: mol_type = other RNA
ctggtctatctgcctggccc

SEQ ID NO: 2241 - RNA, 20 nt, synthetic construct
  source 1..20: mol_type = other RNA
ctgtctgcagcttgtggcct

SEQ ID NO: 2242 - RNA, 20 nt, synthetic construct
  source 1..20: mol_type = other RNA
ctgtgccatctctcgtttct

SEQ ID NO: 2243 - RNA, 20 nt, synthetic construct
  source 1..20: mol_type = other RNA
ctgtgccgccggaactctgc

SEQ ID NO: 2244 - RNA, 20 nt, synthetic construct
  source 1..20: mol_type = other RNA
ctgtgccgctttctgtctgc

SEQ ID NO: 2245 - RNA, 20 nt, synthetic construct
  source 1..20: mol_type = other RNA
ctgtgctgaccactctgccc

SEQ ID NO: 2246 - RNA, 20 nt, synthetic construct
  source 1..20: mol_type = other RNA
ctgtgctgacccatgcagtc

SEQ ID NO: 2247 - RNA, 20 nt, synthetic construct
  source 1..20: mol_type = other RNA
ctgtggattcgggtcacctc

SEQ ID NO: 2248 - RNA, 20 nt, synthetic construct
  source 1..20: mol_type = other RNA
ctgtgttgctgcccaaggat

SEQ ID NO: 2249 - RNA, 20 nt, synthetic construct
  source 1..20: mol_type = other RNA
ctgtttccccttcccaggca

SEQ ID NO: 2250 - RNA, 20 nt, synthetic construct
  source 1..20: mol_type = other RNA
cttaccatccctccctcgac

SEQ ID NO: 2251 - RNA, 20 nt, synthetic construct
  source 1..20: mol_type = other RNA
cttaccattccccttcgacc

SEQ ID NO: 2252 - RNA, 20 nt, synthetic construct
  source 1..20: mol_type = other RNA
cttagccactctgtgctgac

SEQ ID NO: 2253 - RNA, 20 nt, synthetic construct
  source 1..20: mol_type = other RNA
cttaggatggccttctccga

SEQ ID NO: 2254 - RNA, 20 nt, synthetic construct
  source 1..20: mol_type = other RNA
cttcaactggccctgggctt

SEQ ID NO: 2255 - RNA, 20 nt, synthetic construct
  source 1..20: mol_type = other RNA
cttcactcgctgggttccct

SEQ ID NO: 2256 - RNA, 20 nt, synthetic construct
  source 1..20: mol_type = other RNA
cttcaggttccgtcttcctc

SEQ ID NO: 2257 - RNA, 20 nt, synthetic construct
  source 1..20: mol_type = other RNA
cttcccaggcaggtcctgct

SEQ ID NO: 2258 - RNA, 20 nt, synthetic construct
  source 1..20: mol_type = other RNA
cttcccctcttccgatgttg

SEQ ID NO: 2259 - RNA, 20 nt, synthetic construct
  source 1..20: mol_type = other RNA
cttccccttgctctctgctg

SEQ ID NO: 2260 - RNA, 20 nt, synthetic construct
  source 1..20: mol_type = other RNA
cttccctgccctgccctctc

SEQ ID NO: 2261 - RNA, 20 nt, synthetic construct
  source 1..20: mol_type = other RNA
cttccctgccgcctccttca

SEQ ID NO: 2262 - RNA, 20 nt, synthetic construct
  source 1..20: mol_type = other RNA
cttccgaattggagccgctt

SEQ ID NO: 2263 - RNA, 20 nt, synthetic construct
  source 1..20: mol_type = other RNA
cttccgatgttgagcccctc

SEQ ID NO: 2264 - RNA, 20 nt, synthetic construct
  source 1..20: mol_type = other RNA
cttccgcattggagtcgctt

SEQ ID NO: 2265 - RNA, 20 nt, synthetic construct
  source 1..20: mol_type = other RNA
cttcctccactccctcttcc

SEQ ID NO: 2266 - RNA, 20 nt, synthetic construct
  source 1..20: mol_type = other RNA
cttccttctcggcgctgcac

SEQ ID NO: 2267 - RNA, 20 nt, synthetic construct
  source 1..20: mol_type = other RNA
cttcgaccaccccacttccg

SEQ ID NO: 2268 - RNA, 20 nt, synthetic construct
  source 1..20: mol_type = other RNA
cttcgacctactctcttccg

SEQ ID NO: 2269 - RNA, 20 nt, synthetic construct
  source 1..20: mol_type = other RNA
cttctccgacggatgtctcc

SEQ ID NO: 2270 - RNA, 20 nt, synthetic construct
  source 1..20: mol_type = other RNA
cttctccttctggggcctgt

SEQ ID NO: 2271 - RNA, 20 nt, synthetic construct
  source 1..20: mol_type = other RNA
cttctcggcgctgcaccacg

SEQ ID NO: 2272 - RNA, 20 nt, synthetic construct
  source 1..20: mol_type = other RNA
cttctgcgccgcctctggcc

SEQ ID NO: 2273 - RNA, 20 nt, synthetic construct
  source 1..20: mol_type = other RNA
cttctggggcctgtgccatc

SEQ ID NO: 2274 - RNA, 20 nt, synthetic construct
  source 1..20: mol_type = other RNA
cttcttgtaggcctgcatca

SEQ ID NO: 2275 - RNA, 20 nt, synthetic construct
  source 1..20: mol_type = other RNA
cttgcgtcccgcctcccctt

SEQ ID NO: 2276 - RNA, 20 nt, synthetic construct
  source 1..20: mol_type = other RNA
cttgctctctgctgtgttgc

SEQ ID NO: 2277 - RNA, 20 nt, synthetic construct
  source 1..20: mol_type = other RNA
cttgctgtgccgccggaact

SEQ ID NO: 2278 - RNA, 20 nt, synthetic construct
  source 1..20: mol_type = other RNA
cttgctttctttgcctggac

SEQ ID NO: 2279 - RNA, 20 nt, synthetic construct
  source 1..20: mol_type = other RNA
cttgggcagcaacacagcag

SEQ ID NO: 2280 - RNA, 20 nt, synthetic construct
  source 1..20: mol_type = other RNA
cttgtaggcctgcatcatca

SEQ ID NO: 2281 - RNA, 20 nt, synthetic construct
  source 1..20: mol_type = other RNA
cttgtggcctgggtcacctc

SEQ ID NO: 2282 - RNA, 20 nt, synthetic construct
  source 1..20: mol_type = other RNA
ctttaactggccctggcttt

SEQ ID NO: 2283 - RNA, 20 nt, synthetic construct
  source 1..20: mol_type = other RNA
ctttagccacctctccatcc

SEQ ID NO: 2284 - RNA, 20 nt, synthetic construct
  source 1..20: mol_type = other RNA
ctttcatttgggcagctccc

SEQ ID NO: 2285 - RNA, 20 nt, synthetic construct
  source 1..20: mol_type = other RNA
ctttccggagcacttccttc

SEQ ID NO: 2286 - RNA, 20 nt, synthetic construct
  source 1..20: mol_type = other RNA
ctttctctgacctgcattct

SEQ ID NO: 2287 - RNA, 20 nt, synthetic construct
  source 1..20: mol_type = other RNA
ctttctgtctgcagcttgtg

SEQ ID NO: 2288 - RNA, 20 nt, synthetic construct
  source 1..20: mol_type = other RNA
ctttctttgcctggacaccc

SEQ ID NO: 2289 - RNA, 20 nt, synthetic construct
  source 1..20: mol_type = other RNA
ctttgagctctactggcttc

SEQ ID NO: 2290 - RNA, 20 nt, synthetic construct
  source 1..20: mol_type = other RNA
ctttgccaccctatgctgac

SEQ ID NO: 2291 - RNA, 20 nt, synthetic construct
  source 1..20: mol_type = other RNA
ctttgcctggacaccccgtt

SEQ ID NO: 2292 - RNA, 20 nt, synthetic construct
  source 1..20: mol_type = other RNA
ctttgcgctgccctcctctc

SEQ ID NO: 2293 - RNA, 20 nt, synthetic construct
  source 1..20: mol_type = other RNA
ctttggcagcctgtgctgac

SEQ ID NO: 2294 - RNA, 20 nt, synthetic construct
  source 1..20: mol_type = other RNA
ctttggggttgtccagaaaa

SEQ ID NO: 2295 - RNA, 20 nt, synthetic construct
  source 1..20: mol_type = other RNA
ctttgtctccttccctgccc

SEQ ID NO: 2296 - RNA, 20 nt, synthetic construct
  source 1..20: mol_type = other RNA
cttttccttctccttctggg

SEQ ID NO: 2297 - RNA, 20 nt, synthetic construct
  source 1..20: mol_type = other RNA
gaaaaacggtgatgatgcag

SEQ ID NO: 2298 - RNA, 20 nt, synthetic construct
  source 1..20: mol_type = other RNA
gaaaagggaacccagcgagt

SEQ ID NO: 2299 - RNA, 20 nt, synthetic construct
  source 1..20: mol_type = other RNA
gaaacagtgggccagaggcg

SEQ ID NO: 2300 - RNA, 20 nt, synthetic construct
  source 1..20: mol_type = other RNA
gaaacgagagatggcacagg

SEQ ID NO: 2301 - RNA, 20 nt, synthetic construct
  source 1..20: mol_type = other RNA
gaaagagcatccttgggcag

SEQ ID NO: 2302 - RNA, 20 nt, synthetic construct
  source 1..20: mol_type = other RNA
gaaagcaagaggatggagag

SEQ ID NO: 2303 - RNA, 20 nt, synthetic construct
  source 1..20: mol_type = other RNA
gaaagcaggacctgcctggg

SEQ ID NO: 2304 - RNA, 20 nt, synthetic construct
  source 1..20: mol_type = other RNA
gaaagcggcacaggcccagg

SEQ ID NO: 2305 - RNA, 20 nt, synthetic construct
  source 1..20: mol_type = other RNA
gaaaggagtgagaggtgacc

SEQ ID NO: 2306 - RNA, 20 nt, synthetic construct
  source 1..20: mol_type = other RNA
gaacccagcgagtgaagacg

SEQ ID NO: 2307 - RNA, 20 nt, synthetic construct
  source 1..20: mol_type = other RNA
gaacctgaaggaggcggcag

SEQ ID NO: 2308 - RNA, 20 nt, synthetic construct
  source 1..20: mol_type = other RNA
gaacctgagccagctcccat

SEQ ID NO: 2309 - RNA, 20 nt, synthetic construct
  source 1..20: mol_type = other RNA
gaacggggtgtccaggcaaa

SEQ ID NO: 2310 - RNA, 20 nt, synthetic construct
  source 1..20: mol_type = other RNA
gaactctgccctctaacgct

SEQ ID NO: 2311 - RNA, 20 nt, synthetic construct
  source 1..20: mol_type = other RNA
gaagacggaacctgaaggag

SEQ ID NO: 2312 - RNA, 20 nt, synthetic construct
  source 1..20: mol_type = other RNA
gaagacggcatggggttggg

SEQ ID NO: 2313 - RNA, 20 nt, synthetic construct
  source 1..20: mol_type = other RNA
gaagagagtaggtcgaaggg

SEQ ID NO: 2314 - RNA, 20 nt, synthetic construct
  source 1..20: mol_type = other RNA
gaagagggagtggaggaaga

SEQ ID NO: 2315 - RNA, 20 nt, synthetic construct
  source 1..20: mol_type = other RNA
gaagaggggaagtcgaggga

SEQ ID NO: 2316 - RNA, 20 nt, synthetic construct
  source 1..20: mol_type = other RNA
gaagccagtagagctcaaag

SEQ ID NO: 2317 - RNA, 20 nt, synthetic construct
  source 1..20: mol_type = other RNA
gaagcggctccaattcggaa

SEQ ID NO: 2318 - RNA, 20 nt, synthetic construct
  source 1..20: mol_type = other RNA
gaaggaaaagggaacccagc

SEQ ID NO: 2319 - RNA, 20 nt, synthetic construct
  source 1..20: mol_type = other RNA
gaaggaagtgctccggaaag

SEQ ID NO: 2320 - RNA, 20 nt, synthetic construct
  source 1..20: mol_type = other RNA
gaaggagaaggaaaagggaa

SEQ ID NO: 2321 - RNA, 20 nt, synthetic construct
  source 1..20: mol_type = other RNA
gaaggagacaaagtccagga

SEQ ID NO: 2322 - RNA, 20 nt, synthetic construct
  source 1..20: mol_type = other RNA
gaaggaggcggcagggaagg

SEQ ID NO: 2323 - RNA, 20 nt, synthetic construct
  source 1..20: mol_type = other RNA
gaaggatctgggccagccgt

SEQ ID NO: 2324 - RNA, 20 nt, synthetic construct
  source 1..20: mol_type = other RNA
gaaggccatcctaagaaacg

SEQ ID NO: 2325 - RNA, 20 nt, synthetic construct
  source 1..20: mol_type = other RNA
gaaggggaaacagtgggcca

SEQ ID NO: 2326 - RNA, 20 nt, synthetic construct
  source 1..20: mol_type = other RNA
gaaggggaatggtaaggagg

SEQ ID NO: 2327 - RNA, 20 nt, synthetic construct
  source 1..20: mol_type = other RNA
gaaggggaatggtaaggggg

SEQ ID NO: 2328 - RNA, 20 nt, synthetic construct
  source 1..20: mol_type = other RNA
gaaggggaggcgggacgcaa

SEQ ID NO: 2329 - RNA, 20 nt, synthetic construct
  source 1..20: mol_type = other RNA
gaagtcgagggagggatggt

SEQ ID NO: 2330 - RNA, 20 nt, synthetic construct
  source 1..20: mol_type = other RNA
gaagtgctccggaaagagca

SEQ ID NO: 2331 - RNA, 20 nt, synthetic construct
  source 1..20: mol_type = other RNA
gaagtggggtggtcgaaggg

SEQ ID NO: 2332 - RNA, 20 nt, synthetic construct
  source 1..20: mol_type = other RNA
gaatccacaggagaacgggg

SEQ ID NO: 2333 - RNA, 20 nt, synthetic construct
  source 1..20: mol_type = other RNA
gaatgcaggtcagagaaagc

SEQ ID NO: 2334 - RNA, 20 nt, synthetic construct
  source 1..20: mol_type = other RNA
gaatggtaaggaggcctggg

SEQ ID NO: 2335 - RNA, 20 nt, synthetic construct
  source 1..20: mol_type = other RNA
gaatggtaagggggactggg

SEQ ID NO: 2336 - RNA, 20 nt, synthetic construct
  source 1..20: mol_type = other RNA
gaattggagccgcttcaact

SEQ ID NO: 2337 - RNA, 20 nt, synthetic construct
  source 1..20: mol_type = other RNA
gacaaagtccaggaccggct

SEQ ID NO: 2338 - RNA, 20 nt, synthetic construct
  source 1..20: mol_type = other RNA
gacaaccccaaagtaccccg

SEQ ID NO: 2339 - RNA, 20 nt, synthetic construct
  source 1..20: mol_type = other RNA
gacaatggccagggccaggc

SEQ ID NO: 2340 - RNA, 20 nt, synthetic construct
  source 1..20: mol_type = other RNA
gacaccccgtcccagtcccc

SEQ ID NO: 2341 - RNA, 20 nt, synthetic construct
  source 1..20: mol_type = other RNA
gacaccccgttctcctgtgg

SEQ ID NO: 2342 - RNA, 20 nt, synthetic construct
  source 1..20: mol_type = other RNA
gacacggggaggatccgctc

SEQ ID NO: 2343 - RNA, 20 nt, synthetic construct
  source 1..20: mol_type = other RNA
gacagaaagcggcacaggcc

SEQ ID NO: 2344 - RNA, 20 nt, synthetic construct
  source 1..20: mol_type = other RNA
gacatcacgtggtgcagcgc

SEQ ID NO: 2345 - RNA, 20 nt, synthetic construct
  source 1..20: mol_type = other RNA
gacatccgtcggagaaggcc

SEQ ID NO: 2346 - RNA, 20 nt, synthetic construct
  source 1..20: mol_type = other RNA
gaccaccccacttccgaatt

SEQ ID NO: 2347 - RNA, 20 nt, synthetic construct
  source 1..20: mol_type = other RNA
gaccactctgccccaggcct

SEQ ID NO: 2348 - RNA, 20 nt, synthetic construct
  source 1..20: mol_type = other RNA
gaccactttgagctctactg

SEQ ID NO: 2349 - RNA, 20 nt, synthetic construct
  source 1..20: mol_type = other RNA
gaccagactgagctatggga

SEQ ID NO: 2350 - RNA, 20 nt, synthetic construct
  source 1..20: mol_type = other RNA
gacccagacacggggaggat

SEQ ID NO: 2351 - RNA, 20 nt, synthetic construct
  source 1..20: mol_type = other RNA
gacccaggccacaagctgca

SEQ ID NO: 2352 - RNA, 20 nt, synthetic construct
  source 1..20: mol_type = other RNA
gacccatgcagtcctcctta

SEQ ID NO: 2353 - RNA, 20 nt, synthetic construct
  source 1..20: mol_type = other RNA
gacccgaatccacaggagaa

SEQ ID NO: 2354 - RNA, 20 nt, synthetic construct
  source 1..20: mol_type = other RNA
gaccggctggaggggctcaa

SEQ ID NO: 2355 - RNA, 20 nt, synthetic construct
  source 1..20: mol_type = other RNA
gacctactctcttccgcatt

SEQ ID NO: 2356 - RNA, 20 nt, synthetic construct
  source 1..20: mol_type = other RNA
gacctgcattctctcccctg

SEQ ID NO: 2357 - RNA, 20 nt, synthetic construct
  source 1..20: mol_type = other RNA
gacctgcctgggaaggggaa

SEQ ID NO: 2358 - RNA, 20 nt, synthetic construct
  source 1..20: mol_type = other RNA
gacgcaagggagacatccgt

SEQ ID NO: 2359 - RNA, 20 nt, synthetic construct
  source 1..20: mol_type = other RNA
gacggaacctgaaggaggcg

SEQ ID NO: 2360 - RNA, 20 nt, synthetic construct
  source 1..20: mol_type = other RNA
gacggatgtctcccttgcgt

SEQ ID NO: 2361 - RNA, 20 nt, synthetic construct
  source 1..20: mol_type = other RNA
gacggcagcgttagagggca

SEQ ID NO: 2362 - RNA, 20 nt, synthetic construct
  source 1..20: mol_type = other RNA
gacggcatggggttgggtga

SEQ ID NO: 2363 - RNA, 20 nt, synthetic construct
  source 1..20: mol_type = other RNA
gacggggtactttggggttg

SEQ ID NO: 2364 - RNA, 20 nt, synthetic construct
  source 1..20: mol_type = other RNA
gacggggtgtcagcataggg

SEQ ID NO: 2365 - RNA, 20 nt, synthetic construct
  source 1..20: mol_type = other RNA
gactagagaggtaagggggg

SEQ ID NO: 2366 - RNA, 20 nt, synthetic construct
  source 1..20: mol_type = other RNA
gactcaggagagagacggca

SEQ ID NO: 2367 - RNA, 20 nt, synthetic construct
  source 1..20: mol_type = other RNA
gactccaatgcggaagagag

SEQ ID NO: 2368 - RNA, 20 nt, synthetic construct
  source 1..20: mol_type = other RNA
gactgagctatgggagctgg

SEQ ID NO: 2369 - RNA, 20 nt, synthetic construct
  source 1..20: mol_type = other RNA
gactgcatgggtcagcacag

SEQ ID NO: 2370 - RNA, 20 nt, synthetic construct
  source 1..20: mol_type = other RNA
gactgggacggggtgtcagc

SEQ ID NO: 2371 - RNA, 20 nt, synthetic construct
  source 1..20: mol_type = other RNA
gacttcccctcttccgatgt

SEQ ID NO: 2372 - RNA, 20 nt, synthetic construct
  source 1..20: mol_type = other RNA
gactttgtctccttccctgc

SEQ ID NO: 2373 - RNA, 20 nt, synthetic construct
  source 1..20: mol_type = other RNA
gagaaagcaggacctgcctg

SEQ ID NO: 2374 - RNA, 20 nt, synthetic construct
  source 1..20: mol_type = other RNA
gagaacggggtgtccaggca

SEQ ID NO: 2375 - RNA, 20 nt, synthetic construct
  source 1..20: mol_type = other RNA
gagaaggaaaagggaaccca

SEQ ID NO: 2376 - RNA, 20 nt, synthetic construct
  source 1..20: mol_type = other RNA
gagaaggaagtgctccggaa

SEQ ID NO: 2377 - RNA, 20 nt, synthetic construct
  source 1..20: mol_type = other RNA
gagaaggccatcctaagaaa

SEQ ID NO: 2378 - RNA, 20 nt, synthetic construct
  source 1..20: mol_type = other RNA
gagaatgcaggtcagagaaa

SEQ ID NO: 2379 - RNA, 20 nt, synthetic construct
  source 1..20: mol_type = other RNA
gagacaaagtccaggaccgg

SEQ ID NO: 2380 - RNA, 20 nt, synthetic construct
  source 1..20: mol_type = other RNA
gagacatccgtcggagaagg

SEQ ID NO: 2381 - RNA, 20 nt, synthetic construct
  source 1..20: mol_type = other RNA
gagacggcagcgttagaggg

SEQ ID NO: 2382 - RNA, 20 nt, synthetic construct
  source 1..20: mol_type = other RNA
gagacggggtactttggggt

SEQ ID NO: 2383 - RNA, 20 nt, synthetic construct
  source 1..20: mol_type = other RNA
gagagaatgcaggtcagaga

SEQ ID NO: 2384 - RNA, 20 nt, synthetic construct
  source 1..20: mol_type = other RNA
gagagacggcagcgttagag

SEQ ID NO: 2385 - RNA, 20 nt, synthetic construct
  source 1..20: mol_type = other RNA
gagagagacggcagcgttag

SEQ ID NO: 2386 - RNA, 20 nt, synthetic construct
  source 1..20: mol_type = other RNA
gagagatgcccggagaggac

SEQ ID NO: 2387 - RNA, 20 nt, synthetic construct
  source 1..20: mol_type = other RNA
gagagatggcacaggcccca

SEQ ID NO: 2388 - RNA, 20 nt, synthetic construct
  source 1..20: mol_type = other RNA
gagagcaaggggaagaggga

SEQ ID NO: 2389 - RNA, 20 nt, synthetic construct
  source 1..20: mol_type = other RNA
gagaggacccagacacgggg

SEQ ID NO: 2390 - RNA, 20 nt, synthetic construct
  source 1..20: mol_type = other RNA
gagaggagggcagcgcaaag

SEQ ID NO: 2391 - RNA, 20 nt, synthetic construct
  source 1..20: mol_type = other RNA
gagagggcagggcagggaag

SEQ ID NO: 2392 - RNA, 20 nt, synthetic construct
  source 1..20: mol_type = other RNA
gagaggtaaggggggtaggg

SEQ ID NO: 2393 - RNA, 20 nt, synthetic construct
  source 1..20: mol_type = other RNA
gagaggtgacccgaatccac

SEQ ID NO: 2394 - RNA, 20 nt, synthetic construct
  source 1..20: mol_type = other RNA
gagaggtggctaaagccagg

SEQ ID NO: 2395 - RNA, 20 nt, synthetic construct
  source 1..20: mol_type = other RNA
gagagtaggtcgaaggggaa

SEQ ID NO: 2396 - RNA, 20 nt, synthetic construct
  source 1..20: mol_type = other RNA
gagatgcccggagaggaccc

SEQ ID NO: 2397 - RNA, 20 nt, synthetic construct
  source 1..20: mol_type = other RNA
gagatggcacaggccccaga

SEQ ID NO: 2398 - RNA, 20 nt, synthetic construct
  source 1..20: mol_type = other RNA
gagcaaggggaagagggagt

SEQ ID NO: 2399 - RNA, 20 nt, synthetic construct
  source 1..20: mol_type = other RNA
gagcacttccttctcggcgc

SEQ ID NO: 2400 - RNA, 20 nt, synthetic construct
  source 1..20: mol_type = other RNA
gagcatccttgggcagcaac

SEQ ID NO: 2401 - RNA, 20 nt, synthetic construct
  source 1..20: mol_type = other RNA
gagccagctcccatagctca

SEQ ID NO: 2402 - RNA, 20 nt, synthetic construct
  source 1..20: mol_type = other RNA
gagcccctccagccggtcct

SEQ ID NO: 2403 - RNA, 20 nt, synthetic construct
  source 1..20: mol_type = other RNA
gagccgcttcaactggccct

SEQ ID NO: 2404 - RNA, 20 nt, synthetic construct
  source 1..20: mol_type = other RNA
gagcggatcctccccgtgtc

SEQ ID NO: 2405 - RNA, 20 nt, synthetic construct
  source 1..20: mol_type = other RNA
gagctagcacagactagaga

SEQ ID NO: 2406 - RNA, 20 nt, synthetic construct
  source 1..20: mol_type = other RNA
gagctatgggagctggctca

SEQ ID NO: 2407 - RNA, 20 nt, synthetic construct
  source 1..20: mol_type = other RNA
gagctcaaagtggtccggac

SEQ ID NO: 2408 - RNA, 20 nt, synthetic construct
  source 1..20: mol_type = other RNA
gagctctactggcttctgcg

SEQ ID NO: 2409 - RNA, 20 nt, synthetic construct
  source 1..20: mol_type = other RNA
gagctgcccaaatgaaagga

SEQ ID NO: 2410 - RNA, 20 nt, synthetic construct
  source 1..20: mol_type = other RNA
gagctggctcaggttcagga

SEQ ID NO: 2411 - RNA, 20 nt, synthetic construct
  source 1..20: mol_type = other RNA
gaggaagacggaacctgaag

SEQ ID NO: 2412 - RNA, 20 nt, synthetic construct
  source 1..20: mol_type = other RNA
gaggacatcacgtggtgcag

SEQ ID NO: 2413 - RNA, 20 nt, synthetic construct
  source 1..20: mol_type = other RNA
gaggacccagacacggggag

SEQ ID NO: 2414 - RNA, 20 nt, synthetic construct
  source 1..20: mol_type = other RNA
gaggactgcatgggtcagca

SEQ ID NO: 2415 - RNA, 20 nt, synthetic construct
  source 1..20: mol_type = other RNA
gaggagagatgcccggagag

SEQ ID NO: 2416 - RNA, 20 nt, synthetic construct
  source 1..20: mol_type = other RNA
gaggagggcagcgcaaagtg

SEQ ID NO: 2417 - RNA, 20 nt, synthetic construct
  source 1..20: mol_type = other RNA
gaggatccgctcagaggaca

SEQ ID NO: 2418 - RNA, 20 nt, synthetic construct
  source 1..20: mol_type = other RNA
gaggatggagaggtggctaa

SEQ ID NO: 2419 - RNA, 20 nt, synthetic construct
  source 1..20: mol_type = other RNA
gaggcctggggcagagtggt

SEQ ID NO: 2420 - RNA, 20 nt, synthetic construct
  source 1..20: mol_type = other RNA
gaggcggcagggaaggatct

SEQ ID NO: 2421 - RNA, 20 nt, synthetic construct
  source 1..20: mol_type = other RNA
gaggcggcgcagaagccagt

SEQ ID NO: 2422 - RNA, 20 nt, synthetic construct
  source 1..20: mol_type = other RNA
gaggcgggacgcaagggaga

SEQ ID NO: 2423 - RNA, 20 nt, synthetic construct
  source 1..20: mol_type = other RNA
gagggaggagagatgcccgg

SEQ ID NO: 2424 - RNA, 20 nt, synthetic construct
  source 1..20: mol_type = other RNA
gagggagggatggtaaggag

SEQ ID NO: 2425 - RNA, 20 nt, synthetic construct
  source 1..20: mol_type = other RNA
gagggagtggaggaagacgg

SEQ ID NO: 2426 - RNA, 20 nt, synthetic construct
  source 1..20: mol_type = other RNA
gagggatggtaaggaggact

SEQ ID NO: 2427 - RNA, 20 nt, synthetic construct
  source 1..20: mol_type = other RNA
gagggcagagttccggcggc

SEQ ID NO: 2428 - RNA, 20 nt, synthetic construct
  source 1..20: mol_type = other RNA
gagggcagcgcaaagtgaca

SEQ ID NO: 2429 - RNA, 20 nt, synthetic construct
  source 1..20: mol_type = other RNA
gagggcagggcagggaagga

SEQ ID NO: 2430 - RNA, 20 nt, synthetic construct
  source 1..20: mol_type = other RNA
gaggggaagtcgagggaggg

SEQ ID NO: 2431 - RNA, 20 nt, synthetic construct
  source 1..20: mol_type = other RNA
gaggggctcaacatcggaag

SEQ ID NO: 2432 - RNA, 20 nt, synthetic construct
  source 1..20: mol_type = other RNA
gaggtaaggggggtagggga

SEQ ID NO: 2433 - RNA, 20 nt, synthetic construct
  source 1..20: mol_type = other RNA
gaggtgacccaggccacaag

SEQ ID NO: 2434 - RNA, 20 nt, synthetic construct
  source 1..20: mol_type = other RNA
gaggtgacccgaatccacag

SEQ ID NO: 2435 - RNA, 20 nt, synthetic construct
  source 1..20: mol_type = other RNA
gaggtggctaaagccaggga

SEQ ID NO: 2436 - RNA, 20 nt, synthetic construct
  source 1..20: mol_type = other RNA
gagtaggtcgaaggggaatg

SEQ ID NO: 2437 - RNA, 20 nt, synthetic construct
  source 1..20: mol_type = other RNA
gagtccggaccactttgagc

SEQ ID NO: 2438 - RNA, 20 nt, synthetic construct
  source 1..20: mol_type = other RNA
gagtcgctttaactggccct

SEQ ID NO: 2439 - RNA, 20 nt, synthetic construct
  source 1..20: mol_type = other RNA
gagtgaagacggcatggggt

SEQ ID NO: 2440 - RNA, 20 nt, synthetic construct
  source 1..20: mol_type = other RNA
gagtgagaggtgacccgaat

SEQ ID NO: 2441 - RNA, 20 nt, synthetic construct
  source 1..20: mol_type = other RNA
gagtgcccttgctgtgccgc

SEQ ID NO: 2442 - RNA, 20 nt, synthetic construct
  source 1..20: mol_type = other RNA
gagtggaggaagacggaacc

SEQ ID NO: 2443 - RNA, 20 nt, synthetic construct
  source 1..20: mol_type = other RNA
gagtggctaagcccagggcc

SEQ ID NO: 2444 - RNA, 20 nt, synthetic construct
  source 1..20: mol_type = other RNA
gagtggtcagcacagagtgg

SEQ ID NO: 2445 - RNA, 20 nt, synthetic construct
  source 1..20: mol_type = other RNA
gagttccggcggcacagcaa

SEQ ID NO: 2446 - RNA, 20 nt, synthetic construct
  source 1..20: mol_type = other RNA
gatagaccagactgagctat

SEQ ID NO: 2447 - RNA, 20 nt, synthetic construct
  source 1..20: mol_type = other RNA
gatccgctcagaggacatca

SEQ ID NO: 2448 - RNA, 20 nt, synthetic construct
  source 1..20: mol_type = other RNA
gatcctccccgtgtctgggt

SEQ ID NO: 2449 - RNA, 20 nt, synthetic construct
  source 1..20: mol_type = other RNA
gatccttccctgccgcctcc

SEQ ID NO: 2450 - RNA, 20 nt, synthetic construct
  source 1..20: mol_type = other RNA
gatctgggccagccgtagag

SEQ ID NO: 2451 - RNA, 20 nt, synthetic construct
  source 1..20: mol_type = other RNA
gatgatgcaggcctacaaga

SEQ ID NO: 2452 - RNA, 20 nt, synthetic construct
  source 1..20: mol_type = other RNA
gatgcaggcctacaagaagg

SEQ ID NO: 2453 - RNA, 20 nt, synthetic construct
  source 1..20: mol_type = other RNA
gatgcccggagaggacccag

SEQ ID NO: 2454 - RNA, 20 nt, synthetic construct
  source 1..20: mol_type = other RNA
gatgctctttccggagcact

SEQ ID NO: 2455 - RNA, 20 nt, synthetic construct
  source 1..20: mol_type = other RNA
gatggagaggtggctaaagc

SEQ ID NO: 2456 - RNA, 20 nt, synthetic construct
  source 1..20: mol_type = other RNA
gatggcacaggccccagaag

SEQ ID NO: 2457 - RNA, 20 nt, synthetic construct
  source 1..20: mol_type = other RNA
gatggccttctccgacggat

SEQ ID NO: 2458 - RNA, 20 nt, synthetic construct
  source 1..20: mol_type = other RNA
gatggtaaggaggactgcat

SEQ ID NO: 2459 - RNA, 20 nt, synthetic construct
  source 1..20: mol_type = other RNA
gatgtcctctgagcggatcc

SEQ ID NO: 2460 - RNA, 20 nt, synthetic construct
  source 1..20: mol_type = other RNA
gatgtctcccttgcgtcccg

SEQ ID NO: 2461 - RNA, 20 nt, synthetic construct
  source 1..20: mol_type = other RNA
gatgttgagcccctccagcc

SEQ ID NO: 2462 - RNA, 20 nt, synthetic construct
  source 1..20: mol_type = other RNA
gattcgggtcacctctcact

SEQ ID NO: 2463 - RNA, 20 nt, synthetic construct
  source 1..20: mol_type = other RNA
gcaaagaaagcaagaggatg

SEQ ID NO: 2464 - RNA, 20 nt, synthetic construct
  source 1..20: mol_type = other RNA
gcaaagcccagggccaggaa

SEQ ID NO: 2465 - RNA, 20 nt, synthetic construct
  source 1..20: mol_type = other RNA
gcaaagtgacaatggccagg

SEQ ID NO: 2466 - RNA, 20 nt, synthetic construct
  source 1..20: mol_type = other RNA
gcaacacagcagagagcaag

SEQ ID NO: 2467 - RNA, 20 nt, synthetic construct
  source 1..20: mol_type = other RNA
gcaagaggatggagaggtgg

SEQ ID NO: 2468 - RNA, 20 nt, synthetic construct
  source 1..20: mol_type = other RNA
gcaagggagacatccgtcgg

SEQ ID NO: 2469 - RNA, 20 nt, synthetic construct
  source 1..20: mol_type = other RNA
gcaagggcactcgggggcga

SEQ ID NO: 2470 - RNA, 20 nt, synthetic construct
  source 1..20: mol_type = other RNA
gcaaggggaagagggagtgg

SEQ ID NO: 2471 - RNA, 20 nt, synthetic construct
  source 1..20: mol_type = other RNA
gcacagactagagaggtaag

SEQ ID NO: 2472 - RNA, 20 nt, synthetic construct
  source 1..20: mol_type = other RNA
gcacagagtggctaagccca

SEQ ID NO: 2473 - RNA, 20 nt, synthetic construct
  source 1..20: mol_type = other RNA
gcacagcaagggcactcggg

SEQ ID NO: 2474 - RNA, 20 nt, synthetic construct
  source 1..20: mol_type = other RNA
gcacaggcccaggggagaga

SEQ ID NO: 2475 - RNA, 20 nt, synthetic construct
  source 1..20: mol_type = other RNA
gcacaggccccagaaggaga

SEQ ID NO: 2476 - RNA, 20 nt, synthetic construct
  source 1..20: mol_type = other RNA
gcacaggctgccaaagccag

SEQ ID NO: 2477 - RNA, 20 nt, synthetic construct
  source 1..20: mol_type = other RNA
gcaccacgtgatgtcctctg

SEQ ID NO: 2478 - RNA, 20 nt, synthetic construct
  source 1..20: mol_type = other RNA
gcactcgggggcgagaggag

SEQ ID NO: 2479 - RNA, 20 nt, synthetic construct
  source 1..20: mol_type = other RNA
gcacttccttctcggcgctg

SEQ ID NO: 2480 - RNA, 20 nt, synthetic construct
  source 1..20: mol_type = other RNA
gcagaagccagtagagctca

SEQ ID NO: 2481 - RNA, 20 nt, synthetic construct
  source 1..20: mol_type = other RNA
gcagacagaaagcggcacag

SEQ ID NO: 2482 - RNA, 20 nt, synthetic construct
  source 1..20: mol_type = other RNA
gcagagagcaaggggaagag

SEQ ID NO: 2483 - RNA, 20 nt, synthetic construct
  source 1..20: mol_type = other RNA
gcagagtggtcagcacagag

SEQ ID NO: 2484 - RNA, 20 nt, synthetic construct
  source 1..20: mol_type = other RNA
gcagagttccggcggcacag

SEQ ID NO: 2485 - RNA, 20 nt, synthetic construct
  source 1..20: mol_type = other RNA
gcagatagaccagactgagc

SEQ ID NO: 2486 - RNA, 20 nt, synthetic construct
  source 1..20: mol_type = other RNA
gcagcaacacagcagagagc

SEQ ID NO: 2487 - RNA, 20 nt, synthetic construct
  source 1..20: mol_type = other RNA
gcagcctgtgctgacccatg

SEQ ID NO: 2488 - RNA, 20 nt, synthetic construct
  source 1..20: mol_type = other RNA
gcagcgcaaagtgacaatgg

SEQ ID NO: 2489 - RNA, 20 nt, synthetic construct
  source 1..20: mol_type = other RNA
gcagcgccgagaaggaagtg

SEQ ID NO: 2490 - RNA, 20 nt, synthetic construct
  source 1..20: mol_type = other RNA
gcagcgttagagggcagagt

SEQ ID NO: 2491 - RNA, 20 nt, synthetic construct
  source 1..20: mol_type = other RNA
gcagctcccctacccccctt

SEQ ID NO: 2492 - RNA, 20 nt, synthetic construct
  source 1..20: mol_type = other RNA
gcagcttgtggcctgggtca

SEQ ID NO: 2493 - RNA, 20 nt, synthetic construct
  source 1..20: mol_type = other RNA
gcaggacctgcctgggaagg

SEQ ID NO: 2494 - RNA, 20 nt, synthetic construct
  source 1..20: mol_type = other RNA
gcaggcctacaagaagggga

SEQ ID NO: 2495 - RNA, 20 nt, synthetic construct
  source 1..20: mol_type = other RNA
gcagggaaggagacaaagtc

SEQ ID NO: 2496 - RNA, 20 nt, synthetic construct
  source 1..20: mol_type = other RNA
gcagggaaggatctgggcca

SEQ ID NO: 2497 - RNA, 20 nt, synthetic construct
  source 1..20: mol_type = other RNA
gcagggcagggaaggagaca

SEQ ID NO: 2498 - RNA, 20 nt, synthetic construct
  source 1..20: mol_type = other RNA
gcaggtcagagaaagcagga

SEQ ID NO: 2499 - RNA, 20 nt, synthetic construct
  source 1..20: mol_type = other RNA
gcaggtcctgctttctctga

SEQ ID NO: 2500 - RNA, 20 nt, synthetic construct
  source 1..20: mol_type = other RNA
gcagtcctccttaccatccc

SEQ ID NO: 2501 - RNA, 20 nt, synthetic construct
  source 1..20: mol_type = other RNA
gcatagggtggcaaagccca

SEQ ID NO: 2502 - RNA, 20 nt, synthetic construct
  source 1..20: mol_type = other RNA
gcatcatcaccgtttttctg

SEQ ID NO: 2503 - RNA, 20 nt, synthetic construct
  source 1..20: mol_type = other RNA
gcatccttgggcagcaacac

SEQ ID NO: 2504 - RNA, 20 nt, synthetic construct
  source 1..20: mol_type = other RNA
gcatctctcctccctcaccc

SEQ ID NO: 2505 - RNA, 20 nt, synthetic construct
  source 1..20: mol_type = other RNA
gcatggggttgggtgaggga

SEQ ID NO: 2506 - RNA, 20 nt, synthetic construct
  source 1..20: mol_type = other RNA
gcatgggtcagcacaggctg

SEQ ID NO: 2507 - RNA, 20 nt, synthetic construct
  source 1..20: mol_type = other RNA
gcattctctcccctgggcct

SEQ ID NO: 2508 - RNA, 20 nt, synthetic construct
  source 1..20: mol_type = other RNA
gcattggagtcgctttaact

SEQ ID NO: 2509 - RNA, 20 nt, synthetic construct
  source 1..20: mol_type = other RNA
gccaaagccagggccagtta

SEQ ID NO: 2510 - RNA, 20 nt, synthetic construct
  source 1..20: mol_type = other RNA
gccacaagctgcagacagaa

SEQ ID NO: 2511 - RNA, 20 nt, synthetic construct
  source 1..20: mol_type = other RNA
gccaccctatgctgacaccc

SEQ ID NO: 2512 - RNA, 20 nt, synthetic construct
  source 1..20: mol_type = other RNA
gccacctctccatcctcttg

SEQ ID NO: 2513 - RNA, 20 nt, synthetic construct
  source 1..20: mol_type = other RNA
gccactctgtgctgaccact

SEQ ID NO: 2514 - RNA, 20 nt, synthetic construct
  source 1..20: mol_type = other RNA
gccagaggcggcgcagaagc

SEQ ID NO: 2515 - RNA, 20 nt, synthetic construct
  source 1..20: mol_type = other RNA
gccagccgtagaggtgaccc

SEQ ID NO: 2516 - RNA, 20 nt, synthetic construct
  source 1..20: mol_type = other RNA
gccagctcccatagctcagt

SEQ ID NO: 2517 - RNA, 20 nt, synthetic construct
  source 1..20: mol_type = other RNA
gccaggcagatagaccagac

SEQ ID NO: 2518 - RNA, 20 nt, synthetic construct
  source 1..20: mol_type = other RNA
gccagggagacggggtactt

SEQ ID NO: 2519 - RNA, 20 nt, synthetic construct
  source 1..20: mol_type = other RNA
gccagggccaggcagataga

SEQ ID NO: 2520 - RNA, 20 nt, synthetic construct
  source 1..20: mol_type = other RNA
gccagggccagttaaagcga

SEQ ID NO: 2521 - RNA, 20 nt, synthetic construct
  source 1..20: mol_type = other RNA
gccagtagagctcaaagtgg

SEQ ID NO: 2522 - RNA, 20 nt, synthetic construct
  source 1..20: mol_type = other RNA
gccagttaaagcgactccaa

SEQ ID NO: 2523 - RNA, 20 nt, synthetic construct
  source 1..20: mol_type = other RNA
gccagttgaagcggctccaa

SEQ ID NO: 2524 - RNA, 20 nt, synthetic construct
  source 1..20: mol_type = other RNA
gccatcctaagaaacgagag

SEQ ID NO: 2525 - RNA, 20 nt, synthetic construct
  source 1..20: mol_type = other RNA
gccatctctcgtttcttagg

SEQ ID NO: 2526 - RNA, 20 nt, synthetic construct
  source 1..20: mol_type = other RNA
gccattgtcactttgcgctg

SEQ ID NO: 2527 - RNA, 20 nt, synthetic construct
  source 1..20: mol_type = other RNA
gcccaaatgaaaggagtgag

SEQ ID NO: 2528 - RNA, 20 nt, synthetic construct
  source 1..20: mol_type = other RNA
gcccaaggatgctctttccg

SEQ ID NO: 2529 - RNA, 20 nt, synthetic construct
  source 1..20: mol_type = other RNA
gcccactgtttccccttccc

SEQ ID NO: 2530 - RNA, 20 nt, synthetic construct
  source 1..20: mol_type = other RNA
gcccagatccttccctgccg

SEQ ID NO: 2531 - RNA, 20 nt, synthetic construct
  source 1..20: mol_type = other RNA
gcccagggccagttgaagcg

SEQ ID NO: 2532 - RNA, 20 nt, synthetic construct
  source 1..20: mol_type = other RNA
gcccaggggagagaatgcag

SEQ ID NO: 2533 - RNA, 20 nt, synthetic construct
  source 1..20: mol_type = other RNA
gccccagaaggagaaggaaa

SEQ ID NO: 2534 - RNA, 20 nt, synthetic construct
  source 1..20: mol_type = other RNA
gccccaggcctccttaccat

SEQ ID NO: 2535 - RNA, 20 nt, synthetic construct
  source 1..20: mol_type = other RNA
gcccccgagtgcccttgctg

SEQ ID NO: 2536 - RNA, 20 nt, synthetic construct
  source 1..20: mol_type = other RNA
gccccgtcgttcctggccct

SEQ ID NO: 2537 - RNA, 20 nt, synthetic construct
  source 1..20: mol_type = other RNA
gcccctccagccggtcctgg

SEQ ID NO: 2538 - RNA, 20 nt, synthetic construct
  source 1..20: mol_type = other RNA
gcccggagaggacccagaca

SEQ ID NO: 2539 - RNA, 20 nt, synthetic construct
  source 1..20: mol_type = other RNA
gccctcctctcgcccccgag

SEQ ID NO: 2540 - RNA, 20 nt, synthetic construct
  source 1..20: mol_type = other RNA
gccctctaacgctgccgtct

SEQ ID NO: 2541 - RNA, 20 nt, synthetic construct
  source 1..20: mol_type = other RNA
gccctctcctgaacctgagc

SEQ ID NO: 2542 - RNA, 20 nt, synthetic construct
  source 1..20: mol_type = other RNA
gccctgccctctcctgaacc

SEQ ID NO: 2543 - RNA, 20 nt, synthetic construct
  source 1..20: mol_type = other RNA
gccctggccattgtcacttt

SEQ ID NO: 2544 - RNA, 20 nt, synthetic construct
  source 1..20: mol_type = other RNA
gccctggctttggcagcctg

SEQ ID NO: 2545 - RNA, 20 nt, synthetic construct
  source 1..20: mol_type = other RNA
gccctgggcttagccactct

SEQ ID NO: 2546 - RNA, 20 nt, synthetic construct
  source 1..20: mol_type = other RNA
gccctgggctttgccaccct

SEQ ID NO: 2547 - RNA, 20 nt, synthetic construct
  source 1..20: mol_type = other RNA
gcccttgctgtgccgccgga

SEQ ID NO: 2548 - RNA, 20 nt, synthetic construct
  source 1..20: mol_type = other RNA
gccgagaaggaagtgctccg

SEQ ID NO: 2549 - RNA, 20 nt, synthetic construct
  source 1..20: mol_type = other RNA
gccgccggaactctgccctc

SEQ ID NO: 2550 - RNA, 20 nt, synthetic construct
  source 1..20: mol_type = other RNA
gccgcctccttcaggttccg

SEQ ID NO: 2551 - RNA, 20 nt, synthetic construct
  source 1..20: mol_type = other RNA
gccgcctctggcccactgtt

SEQ ID NO: 2552 - RNA, 20 nt, synthetic construct
  source 1..20: mol_type = other RNA
gccgcttcaactggccctgg

SEQ ID NO: 2553 - RNA, 20 nt, synthetic construct
  source 1..20: mol_type = other RNA
gccgctttctgtctgcagct

SEQ ID NO: 2554 - RNA, 20 nt, synthetic construct
  source 1..20: mol_type = other RNA
gccggaactctgccctctaa

SEQ ID NO: 2555 - RNA, 20 nt, synthetic construct
  source 1..20: mol_type = other RNA
gccggtcctggactttgtct

SEQ ID NO: 2556 - RNA, 20 nt, synthetic construct
  source 1..20: mol_type = other RNA
gccgtagaggtgacccaggc

SEQ ID NO: 2557 - RNA, 20 nt, synthetic construct
  source 1..20: mol_type = other RNA
gccgtctctctcctgagtcc

SEQ ID NO: 2558 - RNA, 20 nt, synthetic construct
  source 1..20: mol_type = other RNA
gccgtcttcactcgctgggt

SEQ ID NO: 2559 - RNA, 20 nt, synthetic construct
  source 1..20: mol_type = other RNA
gcctacaagaaggggaggcg

SEQ ID NO: 2560 - RNA, 20 nt, synthetic construct
  source 1..20: mol_type = other RNA
gcctccccttcttgtaggcc

SEQ ID NO: 2561 - RNA, 20 nt, synthetic construct
  source 1..20: mol_type = other RNA
gcctccttaccattcccctt

SEQ ID NO: 2562 - RNA, 20 nt, synthetic construct
  source 1..20: mol_type = other RNA
gcctccttcaggttccgtct

SEQ ID NO: 2563 - RNA, 20 nt, synthetic construct
  source 1..20: mol_type = other RNA
gcctctggcccactgtttcc

SEQ ID NO: 2564 - RNA, 20 nt, synthetic construct
  source 1..20: mol_type = other RNA
gcctgcatcatcaccgtttt

SEQ ID NO: 2565 - RNA, 20 nt, synthetic construct
  source 1..20: mol_type = other RNA
gcctggacaccccgttctcc

SEQ ID NO: 2566 - RNA, 20 nt, synthetic construct
  source 1..20: mol_type = other RNA
gcctggccctggccattgtc

SEQ ID NO: 2567 - RNA, 20 nt, synthetic construct
  source 1..20: mol_type = other RNA
gcctgggaaggggaaacagt

SEQ ID NO: 2568 - RNA, 20 nt, synthetic construct
  source 1..20: mol_type = other RNA
gcctggggcagagtggtcag

SEQ ID NO: 2569 - RNA, 20 nt, synthetic construct
  source 1..20: mol_type = other RNA
gcctgggtcacctctacggc

SEQ ID NO: 2570 - RNA, 20 nt, synthetic construct
  source 1..20: mol_type = other RNA
gcctgtgccatctctcgttt

SEQ ID NO: 2571 - RNA, 20 nt, synthetic construct
  source 1..20: mol_type = other RNA
gcctgtgccgctttctgtct

SEQ ID NO: 2572 - RNA, 20 nt, synthetic construct
  source 1..20: mol_type = other RNA
gcctgtgctgacccatgcag

SEQ ID NO: 2573 - RNA, 20 nt, synthetic construct
  source 1..20: mol_type = other RNA
gccttctccgacggatgtct

SEQ ID NO: 2574 - RNA, 20 nt, synthetic construct
  source 1..20: mol_type = other RNA
gcgactccaatgcggaagag

SEQ ID NO: 2575 - RNA, 20 nt, synthetic construct
  source 1..20: mol_type = other RNA
gcgagaggagggcagcgcaa

SEQ ID NO: 2576 - RNA, 20 nt, synthetic construct
  source 1..20: mol_type = other RNA
gcgagtgaagacggcatggg

SEQ ID NO: 2577 - RNA, 20 nt, synthetic construct
  source 1..20: mol_type = other RNA
gcgcaaagtgacaatggcca

SEQ ID NO: 2578 - RNA, 20 nt, synthetic construct
  source 1..20: mol_type = other RNA
gcgcagaagccagtagagct

SEQ ID NO: 2579 - RNA, 20 nt, synthetic construct
  source 1..20: mol_type = other RNA
gcgccgagaaggaagtgctc

SEQ ID NO: 2580 - RNA, 20 nt, synthetic construct
  source 1..20: mol_type = other RNA
gcgccgcctctggcccactg

SEQ ID NO: 2581 - RNA, 20 nt, synthetic construct
  source 1..20: mol_type = other RNA
gcgctgcaccacgtgatgtc

SEQ ID NO: 2582 - RNA, 20 nt, synthetic construct
  source 1..20: mol_type = other RNA
gcgctgccctcctctcgccc

SEQ ID NO: 2583 - RNA, 20 nt, synthetic construct
  source 1..20: mol_type = other RNA
gcggaagagagtaggtcgaa

SEQ ID NO: 2584 - RNA, 20 nt, synthetic construct
  source 1..20: mol_type = other RNA
gcggatcctccccgtgtctg

SEQ ID NO: 2585 - RNA, 20 nt, synthetic construct
  source 1..20: mol_type = other RNA
gcggcacagcaagggcactc

SEQ ID NO: 2586 - RNA, 20 nt, synthetic construct
  source 1..20: mol_type = other RNA
gcggcacaggcccaggggag

SEQ ID NO: 2587 - RNA, 20 nt, synthetic construct
  source 1..20: mol_type = other RNA
gcggcagggaaggatctggg

SEQ ID NO: 2588 - RNA, 20 nt, synthetic construct
  source 1..20: mol_type = other RNA
gcggcgcagaagccagtaga

SEQ ID NO: 2589 - RNA, 20 nt, synthetic construct
  source 1..20: mol_type = other RNA
gcggctccaattcggaagtg

SEQ ID NO: 2590 - RNA, 20 nt, synthetic construct
  source 1..20: mol_type = other RNA
gcgggacgcaagggagacat

SEQ ID NO: 2591 - RNA, 20 nt, synthetic construct
  source 1..20: mol_type = other RNA
gcgtcccgcctccccttctt

SEQ ID NO: 2592 - RNA, 20 nt, synthetic construct
  source 1..20: mol_type = other RNA
gcgttagagggcagagttcc

SEQ ID NO: 2593 - RNA, 20 nt, synthetic construct
  source 1..20: mol_type = other RNA
gctaaagccagggagacggg

SEQ ID NO: 2594 - RNA, 20 nt, synthetic construct
  source 1..20: mol_type = other RNA
gctaagcccagggccagttg

SEQ ID NO: 2595 - RNA, 20 nt, synthetic construct
  source 1..20: mol_type = other RNA
gctagcacagactagagagg

SEQ ID NO: 2596 - RNA, 20 nt, synthetic construct
  source 1..20: mol_type = other RNA
gctatgggagctggctcagg

SEQ ID NO: 2597 - RNA, 20 nt, synthetic construct
  source 1..20: mol_type = other RNA
gctcaaagtggtccggactc

SEQ ID NO: 2598 - RNA, 20 nt, synthetic construct
  source 1..20: mol_type = other RNA
gctcaacatcggaagagggg

SEQ ID NO: 2599 - RNA, 20 nt, synthetic construct
  source 1..20: mol_type = other RNA
gctcagaggacatcacgtgg

SEQ ID NO: 2600 - RNA, 20 nt, synthetic construct
  source 1..20: mol_type = other RNA
gctcaggttcaggagagggc

SEQ ID NO: 2601 - RNA, 20 nt, synthetic construct
  source 1..20: mol_type = other RNA
gctcagtctggtctatctgc

SEQ ID NO: 2602 - RNA, 20 nt, synthetic construct
  source 1..20: mol_type = other RNA
gctccaattcggaagtgggg

SEQ ID NO: 2603 - RNA, 20 nt, synthetic construct
  source 1..20: mol_type = other RNA
gctcccatagctcagtctgg

SEQ ID NO: 2604 - RNA, 20 nt, synthetic construct
  source 1..20: mol_type = other RNA
gctcccctaccccccttacc

SEQ ID NO: 2605 - RNA, 20 nt, synthetic construct
  source 1..20: mol_type = other RNA
gctccggaaagagcatcctt

SEQ ID NO: 2606 - RNA, 20 nt, synthetic construct
  source 1..20: mol_type = other RNA
gctctactggcttctgcgcc

SEQ ID NO: 2607 - RNA, 20 nt, synthetic construct
  source 1..20: mol_type = other RNA
gctctctgctgtgttgctgc

SEQ ID NO: 2608 - RNA, 20 nt, synthetic construct
  source 1..20: mol_type = other RNA
gctctttccggagcacttcc

SEQ ID NO: 2609 - RNA, 20 nt, synthetic construct
  source 1..20: mol_type = other RNA
gctgacaccccgtcccagtc

SEQ ID NO: 2610 - RNA, 20 nt, synthetic construct
  source 1..20: mol_type = other RNA
gctgaccactctgccccagg

SEQ ID NO: 2611 - RNA, 20 nt, synthetic construct
  source 1..20: mol_type = other RNA
gctgacccatgcagtcctcc

SEQ ID NO: 2612 - RNA, 20 nt, synthetic construct
  source 1..20: mol_type = other RNA
gctgcaccacgtgatgtcct

SEQ ID NO: 2613 - RNA, 20 nt, synthetic construct
  source 1..20: mol_type = other RNA
gctgcagacagaaagcggca

SEQ ID NO: 2614 - RNA, 20 nt, synthetic construct
  source 1..20: mol_type = other RNA
gctgccaaagccagggccag

SEQ ID NO: 2615 - RNA, 20 nt, synthetic construct
  source 1..20: mol_type = other RNA
gctgcccaaatgaaaggagt

SEQ ID NO: 2616 - RNA, 20 nt, synthetic construct
  source 1..20: mol_type = other RNA
gctgcccaaggatgctcttt

SEQ ID NO: 2617 - RNA, 20 nt, synthetic construct
  source 1..20: mol_type = other RNA
gctgccctcctctcgccccc

SEQ ID NO: 2618 - RNA, 20 nt, synthetic construct
  source 1..20: mol_type = other RNA
gctgccgtctctctcctgag

SEQ ID NO: 2619 - RNA, 20 nt, synthetic construct
  source 1..20: mol_type = other RNA
gctggaggggctcaacatcg

SEQ ID NO: 2620 - RNA, 20 nt, synthetic construct
  source 1..20: mol_type = other RNA
gctggcccagatccttccct

SEQ ID NO: 2621 - RNA, 20 nt, synthetic construct
  source 1..20: mol_type = other RNA
gctggctcaggttcaggaga

SEQ ID NO: 2622 - RNA, 20 nt, synthetic construct
  source 1..20: mol_type = other RNA
gctgggttcccttttccttc

SEQ ID NO: 2623 - RNA, 20 nt, synthetic construct
  source 1..20: mol_type = other RNA
gctgtgccgccggaactctg

SEQ ID NO: 2624 - RNA, 20 nt, synthetic construct
  source 1..20: mol_type = other RNA
gctgtgttgctgcccaagga

SEQ ID NO: 2625 - RNA, 20 nt, synthetic construct
  source 1..20: mol_type = other RNA
gcttagccactctgtgctga

SEQ ID NO: 2626 - RNA, 20 nt, synthetic construct
  source 1..20: mol_type = other RNA
gcttcaactggccctgggct

SEQ ID NO: 2627 - RNA, 20 nt, synthetic construct
  source 1..20: mol_type = other RNA
gcttctgcgccgcctctggc

SEQ ID NO: 2628 - RNA, 20 nt, synthetic construct
  source 1..20: mol_type = other RNA
gcttgtggcctgggtcacct

SEQ ID NO: 2629 - RNA, 20 nt, synthetic construct
  source 1..20: mol_type = other RNA
gctttaactggccctggctt

SEQ ID NO: 2630 - RNA, 20 nt, synthetic construct
  source 1..20: mol_type = other RNA
gctttagccacctctccatc

SEQ ID NO: 2631 - RNA, 20 nt, synthetic construct
  source 1..20: mol_type = other RNA
gctttctctgacctgcattc

SEQ ID NO: 2632 - RNA, 20 nt, synthetic construct
  source 1..20: mol_type = other RNA
gctttctgtctgcagcttgt

SEQ ID NO: 2633 - RNA, 20 nt, synthetic construct
  source 1..20: mol_type = other RNA
gctttctttgcctggacacc

SEQ ID NO: 2634 - RNA, 20 nt, synthetic construct
  source 1..20: mol_type = other RNA
gctttgccaccctatgctga

SEQ ID NO: 2635 - RNA, 20 nt, synthetic construct
  source 1..20: mol_type = other RNA
gctttggcagcctgtgctga

SEQ ID NO: 2636 - RNA, 20 nt, synthetic construct
  source 1..20: mol_type = other RNA
ggaaaagggaacccagcgag

SEQ ID NO: 2637 - RNA, 20 nt, synthetic construct
  source 1..20: mol_type = other RNA
ggaaacagtgggccagaggc

SEQ ID NO: 2638 - RNA, 20 nt, synthetic construct
  source 1..20: mol_type = other RNA
ggaaagagcatccttgggca

SEQ ID NO: 2639 - RNA, 20 nt, synthetic construct
  source 1..20: mol_type = other RNA
ggaacccagcgagtgaagac

SEQ ID NO: 2640 - RNA, 20 nt, synthetic construct
  source 1..20: mol_type = other RNA
ggaacctgaaggaggcggca

SEQ ID NO: 2641 - RNA, 20 nt, synthetic construct
  source 1..20: mol_type = other RNA
ggaactctgccctctaacgc

SEQ ID NO: 2642 - RNA, 20 nt, synthetic construct
  source 1..20: mol_type = other RNA
ggaagacggaacctgaagga

SEQ ID NO: 2643 - RNA, 20 nt, synthetic construct
  source 1..20: mol_type = other RNA
ggaagagagtaggtcgaagg

SEQ ID NO: 2644 - RNA, 20 nt, synthetic construct
  source 1..20: mol_type = other RNA
ggaagagggagtggaggaag

SEQ ID NO: 2645 - RNA, 20 nt, synthetic construct
  source 1..20: mol_type = other RNA
ggaagaggggaagtcgaggg

SEQ ID NO: 2646 - RNA, 20 nt, synthetic construct
  source 1..20: mol_type = other RNA
ggaaggagacaaagtccagg

SEQ ID NO: 2647 - RNA, 20 nt, synthetic construct
  source 1..20: mol_type = other RNA
ggaaggatctgggccagccg

SEQ ID NO: 2648 - RNA, 20 nt, synthetic construct
  source 1..20: mol_type = other RNA
ggaaggggaaacagtgggcc

SEQ ID NO: 2649 - RNA, 20 nt, synthetic construct
  source 1..20: mol_type = other RNA
ggaagtcgagggagggatgg

SEQ ID NO: 2650 - RNA, 20 nt, synthetic construct
  source 1..20: mol_type = other RNA
ggaagtgctccggaaagagc

SEQ ID NO: 2651 - RNA, 20 nt, synthetic construct
  source 1..20: mol_type = other RNA
ggaagtggggtggtcgaagg

SEQ ID NO: 2652 - RNA, 20 nt, synthetic construct
  source 1..20: mol_type = other RNA
ggaatggtaaggaggcctgg

SEQ ID NO: 2653 - RNA, 20 nt, synthetic construct
  source 1..20: mol_type = other RNA
ggaatggtaagggggactgg

SEQ ID NO: 2654 - RNA, 20 nt, synthetic construct
  source 1..20: mol_type = other RNA
ggacaaccccaaagtacccc

SEQ ID NO: 2655 - RNA, 20 nt, synthetic construct
  source 1..20: mol_type = other RNA
ggacaccccgttctcctgtg

SEQ ID NO: 2656 - RNA, 20 nt, synthetic construct
  source 1..20: mol_type = other RNA
ggacatcacgtggtgcagcg

SEQ ID NO: 2657 - RNA, 20 nt, synthetic construct
  source 1..20: mol_type = other RNA
ggaccactttgagctctact

SEQ ID NO: 2658 - RNA, 20 nt, synthetic construct
  source 1..20: mol_type = other RNA
ggacccagacacggggagga

SEQ ID NO: 2659 - RNA, 20 nt, synthetic construct
  source 1..20: mol_type = other RNA
ggaccggctggaggggctca

SEQ ID NO: 2660 - RNA, 20 nt, synthetic construct
  source 1..20: mol_type = other RNA
ggacctgcctgggaagggga

SEQ ID NO: 2661 - RNA, 20 nt, synthetic construct
  source 1..20: mol_type = other RNA
ggacgcaagggagacatccg

SEQ ID NO: 2662 - RNA, 20 nt, synthetic construct
  source 1..20: mol_type = other RNA
ggacggggtgtcagcatagg

SEQ ID NO: 2663 - RNA, 20 nt, synthetic construct
  source 1..20: mol_type = other RNA
ggactcaggagagagacggc

SEQ ID NO: 2664 - RNA, 20 nt, synthetic construct
  source 1..20: mol_type = other RNA
ggactgcatgggtcagcaca

SEQ ID NO: 2665 - RNA, 20 nt, synthetic construct
  source 1..20: mol_type = other RNA
ggactgggacggggtgtcag

SEQ ID NO: 2666 - RNA, 20 nt, synthetic construct
  source 1..20: mol_type = other RNA
ggactttgtctccttccctg

SEQ ID NO: 2667 - RNA, 20 nt, synthetic construct
  source 1..20: mol_type = other RNA
ggagaacggggtgtccaggc

SEQ ID NO: 2668 - RNA, 20 nt, synthetic construct
  source 1..20: mol_type = other RNA
ggagaaggaaaagggaaccc

SEQ ID NO: 2669 - RNA, 20 nt, synthetic construct
  source 1..20: mol_type = other RNA
ggagaaggccatcctaagaa

SEQ ID NO: 2670 - RNA, 20 nt, synthetic construct
  source 1..20: mol_type = other RNA
ggagacaaagtccaggaccg

SEQ ID NO: 2671 - RNA, 20 nt, synthetic construct
  source 1..20: mol_type = other RNA
ggagacatccgtcggagaag

SEQ ID NO: 2672 - RNA, 20 nt, synthetic construct
  source 1..20: mol_type = other RNA
ggagacggggtactttgggg

SEQ ID NO: 2673 - RNA, 20 nt, synthetic construct
  source 1..20: mol_type = other RNA
ggagagaatgcaggtcagag

SEQ ID NO: 2674 - RNA, 20 nt, synthetic construct
  source 1..20: mol_type = other RNA
ggagagagacggcagcgtta

SEQ ID NO: 2675 - RNA, 20 nt, synthetic construct
  source 1..20: mol_type = other RNA
ggagagatgcccggagagga

SEQ ID NO: 2676 - RNA, 20 nt, synthetic construct
  source 1..20: mol_type = other RNA
ggagaggacccagacacggg

SEQ ID NO: 2677 - RNA, 20 nt, synthetic construct
  source 1..20: mol_type = other RNA
ggagagggcagggcagggaa

SEQ ID NO: 2678 - RNA, 20 nt, synthetic construct
  source 1..20: mol_type = other RNA
ggagaggtggctaaagccag

SEQ ID NO: 2679 - RNA, 20 nt, synthetic construct
  source 1..20: mol_type = other RNA
ggagcacttccttctcggcg

SEQ ID NO: 2680 - RNA, 20 nt, synthetic construct
  source 1..20: mol_type = other RNA
ggagccgcttcaactggccc

SEQ ID NO: 2681 - RNA, 20 nt, synthetic construct
  source 1..20: mol_type = other RNA
ggagctgcccaaatgaaagg

SEQ ID NO: 2682 - RNA, 20 nt, synthetic construct
  source 1..20: mol_type = other RNA
ggagctggctcaggttcagg

SEQ ID NO: 2683 - RNA, 20 nt, synthetic construct
  source 1..20: mol_type = other RNA
ggaggaagacggaacctgaa

SEQ ID NO: 2684 - RNA, 20 nt, synthetic construct
  source 1..20: mol_type = other RNA
ggaggactgcatgggtcagc

SEQ ID NO: 2685 - RNA, 20 nt, synthetic construct
  source 1..20: mol_type = other RNA
ggaggagagatgcccggaga

SEQ ID NO: 2686 - RNA, 20 nt, synthetic construct
  source 1..20: mol_type = other RNA
ggaggatccgctcagaggac

SEQ ID NO: 2687 - RNA, 20 nt, synthetic construct
  source 1..20: mol_type = other RNA
ggaggcctggggcagagtgg

SEQ ID NO: 2688 - RNA, 20 nt, synthetic construct
  source 1..20: mol_type = other RNA
ggaggcggcagggaaggatc

SEQ ID NO: 2689 - RNA, 20 nt, synthetic construct
  source 1..20: mol_type = other RNA
ggaggcgggacgcaagggag

SEQ ID NO: 2690 - RNA, 20 nt, synthetic construct
  source 1..20: mol_type = other RNA
ggagggatggtaaggaggac

SEQ ID NO: 2691 - RNA, 20 nt, synthetic construct
  source 1..20: mol_type = other RNA
ggagggcagcgcaaagtgac

SEQ ID NO: 2692 - RNA, 20 nt, synthetic construct
  source 1..20: mol_type = other RNA
ggaggggctcaacatcggaa

SEQ ID NO: 2693 - RNA, 20 nt, synthetic construct
  source 1..20: mol_type = other RNA
ggagtcgctttaactggccc

SEQ ID NO: 2694 - RNA, 20 nt, synthetic construct
  source 1..20: mol_type = other RNA
ggagtgagaggtgacccgaa

SEQ ID NO: 2695 - RNA, 20 nt, synthetic construct
  source 1..20: mol_type = other RNA
ggagtggaggaagacggaac

SEQ ID NO: 2696 - RNA, 20 nt, synthetic construct
  source 1..20: mol_type = other RNA
ggatccgctcagaggacatc

SEQ ID NO: 2697 - RNA, 20 nt, synthetic construct
  source 1..20: mol_type = other RNA
ggatcctccccgtgtctggg

SEQ ID NO: 2698 - RNA, 20 nt, synthetic construct
  source 1..20: mol_type = other RNA
ggatctgggccagccgtaga

SEQ ID NO: 2699 - RNA, 20 nt, synthetic construct
  source 1..20: mol_type = other RNA
ggatgctctttccggagcac

SEQ ID NO: 2700 - RNA, 20 nt, synthetic construct
  source 1..20: mol_type = other RNA
ggatggagaggtggctaaag

SEQ ID NO: 2701 - RNA, 20 nt, synthetic construct
  source 1..20: mol_type = other RNA
ggatggccttctccgacgga

SEQ ID NO: 2702 - RNA, 20 nt, synthetic construct
  source 1..20: mol_type = other RNA
ggatggtaaggaggactgca

SEQ ID NO: 2703 - RNA, 20 nt, synthetic construct
  source 1..20: mol_type = other RNA
ggatgtctcccttgcgtccc

SEQ ID NO: 2704 - RNA, 20 nt, synthetic construct
  source 1..20: mol_type = other RNA
ggattcgggtcacctctcac

SEQ ID NO: 2705 - RNA, 20 nt, synthetic construct
  source 1..20: mol_type = other RNA
ggcaaagaaagcaagaggat

SEQ ID NO: 2706 - RNA, 20 nt, synthetic construct
  source 1..20: mol_type = other RNA
ggcaaagcccagggccagga

SEQ ID NO: 2707 - RNA, 20 nt, synthetic construct
  source 1..20: mol_type = other RNA
ggcacagcaagggcactcgg

SEQ ID NO: 2708 - RNA, 20 nt, synthetic construct
  source 1..20: mol_type = other RNA
ggcacaggcccaggggagag

SEQ ID NO: 2709 - RNA, 20 nt, synthetic construct
  source 1..20: mol_type = other RNA
ggcacaggccccagaaggag

SEQ ID NO: 2710 - RNA, 20 nt, synthetic construct
  source 1..20: mol_type = other RNA
ggcactcgggggcgagagga

SEQ ID NO: 2711 - RNA, 20 nt, synthetic construct
  source 1..20: mol_type = other RNA
ggcagagtggtcagcacaga

SEQ ID NO: 2712 - RNA, 20 nt, synthetic construct
  source 1..20: mol_type = other RNA
ggcagagttccggcggcaca

SEQ ID NO: 2713 - RNA, 20 nt, synthetic construct
  source 1..20: mol_type = other RNA
ggcagatagaccagactgag

SEQ ID NO: 2714 - RNA, 20 nt, synthetic construct
  source 1..20: mol_type = other RNA
ggcagcaacacagcagagag

SEQ ID NO: 2715 - RNA, 20 nt, synthetic construct
  source 1..20: mol_type = other RNA
ggcagcctgtgctgacccat

SEQ ID NO: 2716 - RNA, 20 nt, synthetic construct
  source 1..20: mol_type = other RNA
ggcagcgcaaagtgacaatg

SEQ ID NO: 2717 - RNA, 20 nt, synthetic construct
  source 1..20: mol_type = other RNA
ggcagcgttagagggcagag

SEQ ID NO: 2718 - RNA, 20 nt, synthetic construct
  source 1..20: mol_type = other RNA
ggcagctcccctacccccct

SEQ ID NO: 2719 - RNA, 20 nt, synthetic construct
  source 1..20: mol_type = other RNA
ggcagggaaggagacaaagt

SEQ ID NO: 2720 - RNA, 20 nt, synthetic construct
  source 1..20: mol_type = other RNA
ggcagggaaggatctgggcc

SEQ ID NO: 2721 - RNA, 20 nt, synthetic construct
  source 1..20: mol_type = other RNA
ggcagggcagggaaggagac

SEQ ID NO: 2722 - RNA, 20 nt, synthetic construct
  source 1..20: mol_type = other RNA
ggcaggtcctgctttctctg

SEQ ID NO: 2723 - RNA, 20 nt, synthetic construct
  source 1..20: mol_type = other RNA
ggcatctctcctccctcacc

SEQ ID NO: 2724 - RNA, 20 nt, synthetic construct
  source 1..20: mol_type = other RNA
ggcatggggttgggtgaggg

SEQ ID NO: 2725 - RNA, 20 nt, synthetic construct
  source 1..20: mol_type = other RNA
ggccacaagctgcagacaga

SEQ ID NO: 2726 - RNA, 20 nt, synthetic construct
  source 1..20: mol_type = other RNA
ggccagaggcggcgcagaag

SEQ ID NO: 2727 - RNA, 20 nt, synthetic construct
  source 1..20: mol_type = other RNA
ggccagccgtagaggtgacc

SEQ ID NO: 2728 - RNA, 20 nt, synthetic construct
  source 1..20: mol_type = other RNA
ggccaggcagatagaccaga

SEQ ID NO: 2729 - RNA, 20 nt, synthetic construct
  source 1..20: mol_type = other RNA
ggccagggccaggcagatag

SEQ ID NO: 2730 - RNA, 20 nt, synthetic construct
  source 1..20: mol_type = other RNA
ggccagttaaagcgactcca

SEQ ID NO: 2731 - RNA, 20 nt, synthetic construct
  source 1..20: mol_type = other RNA
ggccagttgaagcggctcca

SEQ ID NO: 2732 - RNA, 20 nt, synthetic construct
  source 1..20: mol_type = other RNA
ggccatcctaagaaacgaga

SEQ ID NO: 2733 - RNA, 20 nt, synthetic construct
  source 1..20: mol_type = other RNA
ggccattgtcactttgcgct

SEQ ID NO: 2734 - RNA, 20 nt, synthetic construct
  source 1..20: mol_type = other RNA
ggcccactgtttccccttcc

SEQ ID NO: 2735 - RNA, 20 nt, synthetic construct
  source 1..20: mol_type = other RNA
ggcccagatccttccctgcc

SEQ ID NO: 2736 - RNA, 20 nt, synthetic construct
  source 1..20: mol_type = other RNA
ggcccaggggagagaatgca

SEQ ID NO: 2737 - RNA, 20 nt, synthetic construct
  source 1..20: mol_type = other RNA
ggccccagaaggagaaggaa

SEQ ID NO: 2738 - RNA, 20 nt, synthetic construct
  source 1..20: mol_type = other RNA
ggccctggccattgtcactt

SEQ ID NO: 2739 - RNA, 20 nt, synthetic construct
  source 1..20: mol_type = other RNA
ggccctggctttggcagcct

SEQ ID NO: 2740 - RNA, 20 nt, synthetic construct
  source 1..20: mol_type = other RNA
ggccctgggcttagccactc

SEQ ID NO: 2741 - RNA, 20 nt, synthetic construct
  source 1..20: mol_type = other RNA
ggccctgggctttgccaccc

SEQ ID NO: 2742 - RNA, 20 nt, synthetic construct
  source 1..20: mol_type = other RNA
ggcctacaagaaggggaggc

SEQ ID NO: 2743 - RNA, 20 nt, synthetic construct
  source 1..20: mol_type = other RNA
ggcctccttaccattcccct

SEQ ID NO: 2744 - RNA, 20 nt, synthetic construct
  source 1..20: mol_type = other RNA
ggcctgcatcatcaccgttt

SEQ ID NO: 2745 - RNA, 20 nt, synthetic construct
  source 1..20: mol_type = other RNA
ggcctggggcagagtggtca

SEQ ID NO: 2746 - RNA, 20 nt, synthetic construct
  source 1..20: mol_type = other RNA
ggcctgggtcacctctacgg

SEQ ID NO: 2747 - RNA, 20 nt, synthetic construct
  source 1..20: mol_type = other RNA
ggcctgtgccatctctcgtt

SEQ ID NO: 2748 - RNA, 20 nt, synthetic construct
  source 1..20: mol_type = other RNA
ggcctgtgccgctttctgtc

SEQ ID NO: 2749 - RNA, 20 nt, synthetic construct
  source 1..20: mol_type = other RNA
ggccttctccgacggatgtc

SEQ ID NO: 2750 - RNA, 20 nt, synthetic construct
  source 1..20: mol_type = other RNA
ggcgagaggagggcagcgca

SEQ ID NO: 2751 - RNA, 20 nt, synthetic construct
  source 1..20: mol_type = other RNA
ggcgcagaagccagtagagc

SEQ ID NO: 2752 - RNA, 20 nt, synthetic construct
  source 1..20: mol_type = other RNA
ggcgctgcaccacgtgatgt

SEQ ID NO: 2753 - RNA, 20 nt, synthetic construct
  source 1..20: mol_type = other RNA
ggcggcacagcaagggcact

SEQ ID NO: 2754 - RNA, 20 nt, synthetic construct
  source 1..20: mol_type = other RNA
ggcggcagggaaggatctgg

SEQ ID NO: 2755 - RNA, 20 nt, synthetic construct
  source 1..20: mol_type = other RNA
ggcggcgcagaagccagtag

SEQ ID NO: 2756 - RNA, 20 nt, synthetic construct
  source 1..20: mol_type = other RNA
ggcgggacgcaagggagaca

SEQ ID NO: 2757 - RNA, 20 nt, synthetic construct
  source 1..20: mol_type = other RNA
ggctaaagccagggagacgg

SEQ ID NO: 2758 - RNA, 20 nt, synthetic construct
  source 1..20: mol_type = other RNA
ggctaagcccagggccagtt

SEQ ID NO: 2759 - RNA, 20 nt, synthetic construct
  source 1..20: mol_type = other RNA
ggctcaacatcggaagaggg

SEQ ID NO: 2760 - RNA, 20 nt, synthetic construct
  source 1..20: mol_type = other RNA
ggctcaggttcaggagaggg

SEQ ID NO: 2761 - RNA, 20 nt, synthetic construct
  source 1..20: mol_type = other RNA
ggctccaattcggaagtggg

SEQ ID NO: 2762 - RNA, 20 nt, synthetic construct
  source 1..20: mol_type = other RNA
ggctgccaaagccagggcca

SEQ ID NO: 2763 - RNA, 20 nt, synthetic construct
  source 1..20: mol_type = other RNA
ggctggaggggctcaacatc

SEQ ID NO: 2764 - RNA, 20 nt, synthetic construct
  source 1..20: mol_type = other RNA
ggctggcccagatccttccc

SEQ ID NO: 2765 - RNA, 20 nt, synthetic construct
  source 1..20: mol_type = other RNA
ggcttagccactctgtgctg

SEQ ID NO: 2766 - RNA, 20 nt, synthetic construct
  source 1..20: mol_type = other RNA
ggcttctgcgccgcctctgg

SEQ ID NO: 2767 - RNA, 20 nt, synthetic construct
  source 1..20: mol_type = other RNA
ggctttagccacctctccat

SEQ ID NO: 2768 - RNA, 20 nt, synthetic construct
  source 1..20: mol_type = other RNA
ggctttgccaccctatgctg

SEQ ID NO: 2769 - RNA, 20 nt, synthetic construct
  source 1..20: mol_type = other RNA
ggctttggcagcctgtgctg

SEQ ID NO: 2770 - RNA, 20 nt, synthetic construct
  source 1..20: mol_type = other RNA
gggaaacagtgggccagagg

SEQ ID NO: 2771 - RNA, 20 nt, synthetic construct
  source 1..20: mol_type = other RNA
gggaacccagcgagtgaaga

SEQ ID NO: 2772 - RNA, 20 nt, synthetic construct
  source 1..20: mol_type = other RNA
gggaagagggagtggaggaa

SEQ ID NO: 2773 - RNA, 20 nt, synthetic construct
  source 1..20: mol_type = other RNA
gggaaggagacaaagtccag

SEQ ID NO: 2774 - RNA, 20 nt, synthetic construct
  source 1..20: mol_type = other RNA
gggaaggatctgggccagcc

SEQ ID NO: 2775 - RNA, 20 nt, synthetic construct
  source 1..20: mol_type = other RNA
gggaaggggaaacagtgggc

SEQ ID NO: 2776 - RNA, 20 nt, synthetic construct
  source 1..20: mol_type = other RNA
gggaagtcgagggagggatg

SEQ ID NO: 2777 - RNA, 20 nt, synthetic construct
  source 1..20: mol_type = other RNA
gggaatggtaaggaggcctg

SEQ ID NO: 2778 - RNA, 20 nt, synthetic construct
  source 1..20: mol_type = other RNA
gggaatggtaagggggactg

SEQ ID NO: 2779 - RNA, 20 nt, synthetic construct
  source 1..20: mol_type = other RNA
gggacgcaagggagacatcc

SEQ ID NO: 2780 - RNA, 20 nt, synthetic construct
  source 1..20: mol_type = other RNA
gggacggggtgtcagcatag

SEQ ID NO: 2781 - RNA, 20 nt, synthetic construct
  source 1..20: mol_type = other RNA
gggactgggacggggtgtca

SEQ ID NO: 2782 - RNA, 20 nt, synthetic construct
  source 1..20: mol_type = other RNA
gggagacatccgtcggagaa

SEQ ID NO: 2783 - RNA, 20 nt, synthetic construct
  source 1..20: mol_type = other RNA
gggagacggggtactttggg

SEQ ID NO: 2784 - RNA, 20 nt, synthetic construct
  source 1..20: mol_type = other RNA
gggagagaatgcaggtcaga

SEQ ID NO: 2785 - RNA, 20 nt, synthetic construct
  source 1..20: mol_type = other RNA
gggagctgcccaaatgaaag

SEQ ID NO: 2786 - RNA, 20 nt, synthetic construct
  source 1..20: mol_type = other RNA
gggagctggctcaggttcag

SEQ ID NO: 2787 - RNA, 20 nt, synthetic construct
  source 1..20: mol_type = other RNA
gggaggagagatgcccggag

SEQ ID NO: 2788 - RNA, 20 nt, synthetic construct
  source 1..20: mol_type = other RNA
gggaggatccgctcagagga

SEQ ID NO: 2789 - RNA, 20 nt, synthetic construct
  source 1..20: mol_type = other RNA
gggaggcgggacgcaaggga

SEQ ID NO: 2790 - RNA, 20 nt, synthetic construct
  source 1..20: mol_type = other RNA
gggagggatggtaaggagga

SEQ ID NO: 2791 - RNA, 20 nt, synthetic construct
  source 1..20: mol_type = other RNA
gggagtggaggaagacggaa

SEQ ID NO: 2792 - RNA, 20 nt, synthetic construct
  source 1..20: mol_type = other RNA
gggatggtaaggaggactgc

SEQ ID NO: 2793 - RNA, 20 nt, synthetic construct
  source 1..20: mol_type = other RNA
gggcactcgggggcgagagg

SEQ ID NO: 2794 - RNA, 20 nt, synthetic construct
  source 1..20: mol_type = other RNA
gggcagagtggtcagcacag

SEQ ID NO: 2795 - RNA, 20 nt, synthetic construct
  source 1..20: mol_type = other RNA
gggcagagttccggcggcac

SEQ ID NO: 2796 - RNA, 20 nt, synthetic construct
  source 1..20: mol_type = other RNA
gggcagcaacacagcagaga

SEQ ID NO: 2797 - RNA, 20 nt, synthetic construct
  source 1..20: mol_type = other RNA
gggcagcgcaaagtgacaat

SEQ ID NO: 2798 - RNA, 20 nt, synthetic construct
  source 1..20: mol_type = other RNA
gggcagctcccctacccccc

SEQ ID NO: 2799 - RNA, 20 nt, synthetic construct
  source 1..20: mol_type = other RNA
gggcagggaaggagacaaag

SEQ ID NO: 2800 - RNA, 20 nt, synthetic construct
  source 1..20: mol_type = other RNA
gggcagggcagggaaggaga

SEQ ID NO: 2801 - RNA, 20 nt, synthetic construct
  source 1..20: mol_type = other RNA
gggcatctctcctccctcac

SEQ ID NO: 2802 - RNA, 20 nt, synthetic construct
  source 1..20: mol_type = other RNA
gggccagaggcggcgcagaa

SEQ ID NO: 2803 - RNA, 20 nt, synthetic construct
  source 1..20: mol_type = other RNA
gggccagccgtagaggtgac

SEQ ID NO: 2804 - RNA, 20 nt, synthetic construct
  source 1..20: mol_type = other RNA
gggccaggcagatagaccag

SEQ ID NO: 2805 - RNA, 20 nt, synthetic construct
  source 1..20: mol_type = other RNA
gggccagttaaagcgactcc

SEQ ID NO: 2806 - RNA, 20 nt, synthetic construct
  source 1..20: mol_type = other RNA
gggccagttgaagcggctcc

SEQ ID NO: 2807 - RNA, 20 nt, synthetic construct
  source 1..20: mol_type = other RNA
gggcctgtgccatctctcgt

SEQ ID NO: 2808 - RNA, 20 nt, synthetic construct
  source 1..20: mol_type = other RNA
gggcctgtgccgctttctgt

SEQ ID NO: 2809 - RNA, 20 nt, synthetic construct
  source 1..20: mol_type = other RNA
gggcgagaggagggcagcgc

SEQ ID NO: 2810 - RNA, 20 nt, synthetic construct
  source 1..20: mol_type = other RNA
gggctcaacatcggaagagg

SEQ ID NO: 2811 - RNA, 20 nt, synthetic construct
  source 1..20: mol_type = other RNA
gggcttagccactctgtgct

SEQ ID NO: 2812 - RNA, 20 nt, synthetic construct
  source 1..20: mol_type = other RNA
gggctttgccaccctatgct

SEQ ID NO: 2813 - RNA, 20 nt, synthetic construct
  source 1..20: mol_type = other RNA
ggggaaacagtgggccagag

SEQ ID NO: 2814 - RNA, 20 nt, synthetic construct
  source 1..20: mol_type = other RNA
ggggaagagggagtggagga

SEQ ID NO: 2815 - RNA, 20 nt, synthetic construct
  source 1..20: mol_type = other RNA
ggggaagtcgagggagggat

SEQ ID NO: 2816 - RNA, 20 nt, synthetic construct
  source 1..20: mol_type = other RNA
ggggaatggtaaggaggcct

SEQ ID NO: 2817 - RNA, 20 nt, synthetic construct
  source 1..20: mol_type = other RNA
ggggaatggtaagggggact

SEQ ID NO: 2818 - RNA, 20 nt, synthetic construct
  source 1..20: mol_type = other RNA
ggggactgggacggggtgtc

SEQ ID NO: 2819 - RNA, 20 nt, synthetic construct
  source 1..20: mol_type = other RNA
ggggagagaatgcaggtcag

SEQ ID NO: 2820 - RNA, 20 nt, synthetic construct
  source 1..20: mol_type = other RNA
ggggagctgcccaaatgaaa

SEQ ID NO: 2821 - RNA, 20 nt, synthetic construct
  source 1..20: mol_type = other RNA
ggggaggatccgctcagagg

SEQ ID NO: 2822 - RNA, 20 nt, synthetic construct
  source 1..20: mol_type = other RNA
ggggaggcgggacgcaaggg

SEQ ID NO: 2823 - RNA, 20 nt, synthetic construct
  source 1..20: mol_type = other RNA
ggggcagagtggtcagcaca

SEQ ID NO: 2824 - RNA, 20 nt, synthetic construct
  source 1..20: mol_type = other RNA
ggggcctgtgccatctctcg

SEQ ID NO: 2825 - RNA, 20 nt, synthetic construct
  source 1..20: mol_type = other RNA
ggggcgagaggagggcagcg

SEQ ID NO: 2826 - RNA, 20 nt, synthetic construct
  source 1..20: mol_type = other RNA
ggggctcaacatcggaagag

SEQ ID NO: 2827 - RNA, 20 nt, synthetic construct
  source 1..20: mol_type = other RNA
gggggactgggacggggtgt

SEQ ID NO: 2828 - RNA, 20 nt, synthetic construct
  source 1..20: mol_type = other RNA
gggggcgagaggagggcagc

SEQ ID NO: 2829 - RNA, 20 nt, synthetic construct
  source 1..20: mol_type = other RNA
ggggggtaggggagctgccc

SEQ ID NO: 2830 - RNA, 20 nt, synthetic construct
  source 1..20: mol_type = other RNA
gggggtaggggagctgccca

SEQ ID NO: 2831 - RNA, 20 nt, synthetic construct
  source 1..20: mol_type = other RNA
ggggtactttggggttgtcc

SEQ ID NO: 2832 - RNA, 20 nt, synthetic construct
  source 1..20: mol_type = other RNA
ggggtaggggagctgcccaa

SEQ ID NO: 2833 - RNA, 20 nt, synthetic construct
  source 1..20: mol_type = other RNA
ggggtggtcgaaggggaatg

SEQ ID NO: 2834 - RNA, 20 nt, synthetic construct
  source 1..20: mol_type = other RNA
ggggtgtcagcatagggtgg

SEQ ID NO: 2835 - RNA, 20 nt, synthetic construct
  source 1..20: mol_type = other RNA
ggggtgtccaggcaaagaaa

SEQ ID NO: 2836 - RNA, 20 nt, synthetic construct
  source 1..20: mol_type = other RNA
ggggttgggtgagggaggag

SEQ ID NO: 2837 - RNA, 20 nt, synthetic construct
  source 1..20: mol_type = other RNA
ggggttgtccagaaaaacgg

SEQ ID NO: 2838 - RNA, 20 nt, synthetic construct
  source 1..20: mol_type = other RNA
gggtactttggggttgtcca

SEQ ID NO: 2839 - RNA, 20 nt, synthetic construct
  source 1..20: mol_type = other RNA
gggtaggggagctgcccaaa

SEQ ID NO: 2840 - RNA, 20 nt, synthetic construct
  source 1..20: mol_type = other RNA
gggtcacctctacggctggc

SEQ ID NO: 2841 - RNA, 20 nt, synthetic construct
  source 1..20: mol_type = other RNA
gggtcacctctcactccttt

SEQ ID NO: 2842 - RNA, 20 nt, synthetic construct
  source 1..20: mol_type = other RNA
gggtcagcacaggctgccaa

SEQ ID NO: 2843 - RNA, 20 nt, synthetic construct
  source 1..20: mol_type = other RNA
gggtcctctccgggcatctc

SEQ ID NO: 2844 - RNA, 20 nt, synthetic construct
  source 1..20: mol_type = other RNA
gggtgagggaggagagatgc

SEQ ID NO: 2845 - RNA, 20 nt, synthetic construct
  source 1..20: mol_type = other RNA
gggtggcaaagcccagggcc

SEQ ID NO: 2846 - RNA, 20 nt, synthetic construct
  source 1..20: mol_type = other RNA
gggtggtcgaaggggaatgg

SEQ ID NO: 2847 - RNA, 20 nt, synthetic construct
  source 1..20: mol_type = other RNA
gggtgtcagcatagggtggc

SEQ ID NO: 2848 - RNA, 20 nt, synthetic construct
  source 1..20: mol_type = other RNA
gggtgtccaggcaaagaaag

SEQ ID NO: 2849 - RNA, 20 nt, synthetic construct
  source 1..20: mol_type = other RNA
gggttcccttttccttctcc

SEQ ID NO: 2850 - RNA, 20 nt, synthetic construct
  source 1..20: mol_type = other RNA
gggttgggtgagggaggaga

SEQ ID NO: 2851 - RNA, 20 nt, synthetic construct
  source 1..20: mol_type = other RNA
gggttgtccagaaaaacggt

SEQ ID NO: 2852 - RNA, 20 nt, synthetic construct
  source 1..20: mol_type = other RNA
ggtaaggaggactgcatggg

SEQ ID NO: 2853 - RNA, 20 nt, synthetic construct
  source 1..20: mol_type = other RNA
ggtaaggaggcctggggcag

SEQ ID NO: 2854 - RNA, 20 nt, synthetic construct
  source 1..20: mol_type = other RNA
ggtaagggggactgggacgg

SEQ ID NO: 2855 - RNA, 20 nt, synthetic construct
  source 1..20: mol_type = other RNA
ggtaaggggggtaggggagc

SEQ ID NO: 2856 - RNA, 20 nt, synthetic construct
  source 1..20: mol_type = other RNA
ggtactttggggttgtccag

SEQ ID NO: 2857 - RNA, 20 nt, synthetic construct
  source 1..20: mol_type = other RNA
ggtaggggagctgcccaaat

SEQ ID NO: 2858 - RNA, 20 nt, synthetic construct
  source 1..20: mol_type = other RNA
ggtcacctctacggctggcc

SEQ ID NO: 2859 - RNA, 20 nt, synthetic construct
  source 1..20: mol_type = other RNA
ggtcacctctcactcctttc

SEQ ID NO: 2860 - RNA, 20 nt, synthetic construct
  source 1..20: mol_type = other RNA
ggtcagagaaagcaggacct

SEQ ID NO: 2861 - RNA, 20 nt, synthetic construct
  source 1..20: mol_type = other RNA
ggtcagcacagagtggctaa

SEQ ID NO: 2862 - RNA, 20 nt, synthetic construct
  source 1..20: mol_type = other RNA
ggtcagcacaggctgccaaa

SEQ ID NO: 2863 - RNA, 20 nt, synthetic construct
  source 1..20: mol_type = other RNA
ggtccggactcaggagagag

SEQ ID NO: 2864 - RNA, 20 nt, synthetic construct
  source 1..20: mol_type = other RNA
ggtcctctccgggcatctct

SEQ ID NO: 2865 - RNA, 20 nt, synthetic construct
  source 1..20: mol_type = other RNA
ggtcctgctttctctgacct

SEQ ID NO: 2866 - RNA, 20 nt, synthetic construct
  source 1..20: mol_type = other RNA
ggtcctggactttgtctcct

SEQ ID NO: 2867 - RNA, 20 nt, synthetic construct
  source 1..20: mol_type = other RNA
ggtcgaaggggaatggtaag

SEQ ID NO: 2868 - RNA, 20 nt, synthetic construct
  source 1..20: mol_type = other RNA
ggtctatctgcctggccctg

SEQ ID NO: 2869 - RNA, 20 nt, synthetic construct
  source 1..20: mol_type = other RNA
ggtgacccaggccacaagct

SEQ ID NO: 2870 - RNA, 20 nt, synthetic construct
  source 1..20: mol_type = other RNA
ggtgacccgaatccacagga

SEQ ID NO: 2871 - RNA, 20 nt, synthetic construct
  source 1..20: mol_type = other RNA
ggtgagggaggagagatgcc

SEQ ID NO: 2872 - RNA, 20 nt, synthetic construct
  source 1..20: mol_type = other RNA
ggtgatgatgcaggcctaca

SEQ ID NO: 2873 - RNA, 20 nt, synthetic construct
  source 1..20: mol_type = other RNA
ggtgcagcgccgagaaggaa

SEQ ID NO: 2874 - RNA, 20 nt, synthetic construct
  source 1..20: mol_type = other RNA
ggtggcaaagcccagggcca

SEQ ID NO: 2875 - RNA, 20 nt, synthetic construct
  source 1..20: mol_type = other RNA
ggtggctaaagccagggaga

SEQ ID NO: 2876 - RNA, 20 nt, synthetic construct
  source 1..20: mol_type = other RNA
ggtggtcgaaggggaatggt

SEQ ID NO: 2877 - RNA, 20 nt, synthetic construct
  source 1..20: mol_type = other RNA
ggtgtcagcatagggtggca

SEQ ID NO: 2878 - RNA, 20 nt, synthetic construct
  source 1..20: mol_type = other RNA
ggtgtccaggcaaagaaagc

SEQ ID NO: 2879 - RNA, 20 nt, synthetic construct
  source 1..20: mol_type = other RNA
ggttcaggagagggcagggc

SEQ ID NO: 2880 - RNA, 20 nt, synthetic construct
  source 1..20: mol_type = other RNA
ggttcccttttccttctcct

SEQ ID NO: 2881 - RNA, 20 nt, synthetic construct
  source 1..20: mol_type = other RNA
ggttccgtcttcctccactc

SEQ ID NO: 2882 - RNA, 20 nt, synthetic construct
  source 1..20: mol_type = other RNA
ggttgggtgagggaggagag

SEQ ID NO: 2883 - RNA, 20 nt, synthetic construct
  source 1..20: mol_type = other RNA
ggttgtccagaaaaacggtg

SEQ ID NO: 2884 - RNA, 20 nt, synthetic construct
  source 1..20: mol_type = other RNA
gtaaggaggactgcatgggt

SEQ ID NO: 2885 - RNA, 20 nt, synthetic construct
  source 1..20: mol_type = other RNA
gtaaggaggcctggggcaga

SEQ ID NO: 2886 - RNA, 20 nt, synthetic construct
  source 1..20: mol_type = other RNA
gtaagggggactgggacggg

SEQ ID NO: 2887 - RNA, 20 nt, synthetic construct
  source 1..20: mol_type = other RNA
gtaaggggggtaggggagct

SEQ ID NO: 2888 - RNA, 20 nt, synthetic construct
  source 1..20: mol_type = other RNA
gtaccccgtctccctggctt

SEQ ID NO: 2889 - RNA, 20 nt, synthetic construct
  source 1..20: mol_type = other RNA
gtactttggggttgtccaga

SEQ ID NO: 2890 - RNA, 20 nt, synthetic construct
  source 1..20: mol_type = other RNA
gtagagctcaaagtggtccg

SEQ ID NO: 2891 - RNA, 20 nt, synthetic construct
  source 1..20: mol_type = other RNA
gtagaggtgacccaggccac

SEQ ID NO: 2892 - RNA, 20 nt, synthetic construct
  source 1..20: mol_type = other RNA
gtaggcctgcatcatcaccg

SEQ ID NO: 2893 - RNA, 20 nt, synthetic construct
  source 1..20: mol_type = other RNA
gtaggggagctgcccaaatg

SEQ ID NO: 2894 - RNA, 20 nt, synthetic construct
  source 1..20: mol_type = other RNA
gtaggtcgaaggggaatggt

SEQ ID NO: 2895 - RNA, 20 nt, synthetic construct
  source 1..20: mol_type = other RNA
gtcacctctacggctggccc

SEQ ID NO: 2896 - RNA, 20 nt, synthetic construct
  source 1..20: mol_type = other RNA
gtcacctctcactcctttca

SEQ ID NO: 2897 - RNA, 20 nt, synthetic construct
  source 1..20: mol_type = other RNA
gtcactttgcgctgccctcc

SEQ ID NO: 2898 - RNA, 20 nt, synthetic construct
  source 1..20: mol_type = other RNA
gtcagagaaagcaggacctg

SEQ ID NO: 2899 - RNA, 20 nt, synthetic construct
  source 1..20: mol_type = other RNA
gtcagcacagagtggctaag

SEQ ID NO: 2900 - RNA, 20 nt, synthetic construct
  source 1..20: mol_type = other RNA
gtcagcacaggctgccaaag

SEQ ID NO: 2901 - RNA, 20 nt, synthetic construct
  source 1..20: mol_type = other RNA
gtcagcatagggtggcaaag

SEQ ID NO: 2902 - RNA, 20 nt, synthetic construct
  source 1..20: mol_type = other RNA
gtccagaaaaacggtgatga

SEQ ID NO: 2903 - RNA, 20 nt, synthetic construct
  source 1..20: mol_type = other RNA
gtccaggaccggctggaggg

SEQ ID NO: 2904 - RNA, 20 nt, synthetic construct
  source 1..20: mol_type = other RNA
gtccaggcaaagaaagcaag

SEQ ID NO: 2905 - RNA, 20 nt, synthetic construct
  source 1..20: mol_type = other RNA
gtcccagtcccccttaccat

SEQ ID NO: 2906 - RNA, 20 nt, synthetic construct
  source 1..20: mol_type = other RNA
gtcccccttaccattcccct

SEQ ID NO: 2907 - RNA, 20 nt, synthetic construct
  source 1..20: mol_type = other RNA
gtcccgcctccccttcttgt

SEQ ID NO: 2908 - RNA, 20 nt, synthetic construct
  source 1..20: mol_type = other RNA
gtccggaccactttgagctc

SEQ ID NO: 2909 - RNA, 20 nt, synthetic construct
  source 1..20: mol_type = other RNA
gtccggactcaggagagaga

SEQ ID NO: 2910 - RNA, 20 nt, synthetic construct
  source 1..20: mol_type = other RNA
gtcctccttaccatccctcc

SEQ ID NO: 2911 - RNA, 20 nt, synthetic construct
  source 1..20: mol_type = other RNA
gtcctctccgggcatctctc

SEQ ID NO: 2912 - RNA, 20 nt, synthetic construct
  source 1..20: mol_type = other RNA
gtcctctgagcggatcctcc

SEQ ID NO: 2913 - RNA, 20 nt, synthetic construct
  source 1..20: mol_type = other RNA
gtcctgctttctctgacctg

SEQ ID NO: 2914 - RNA, 20 nt, synthetic construct
  source 1..20: mol_type = other RNA
gtcctggactttgtctcctt

SEQ ID NO: 2915 - RNA, 20 nt, synthetic construct
  source 1..20: mol_type = other RNA
gtcgaaggggaatggtaagg

SEQ ID NO: 2916 - RNA, 20 nt, synthetic construct
  source 1..20: mol_type = other RNA
gtcgagggagggatggtaag

SEQ ID NO: 2917 - RNA, 20 nt, synthetic construct
  source 1..20: mol_type = other RNA
gtcgctttaactggccctgg

SEQ ID NO: 2918 - RNA, 20 nt, synthetic construct
  source 1..20: mol_type = other RNA
gtcggagaaggccatcctaa

SEQ ID NO: 2919 - RNA, 20 nt, synthetic construct
  source 1..20: mol_type = other RNA
gtcgttcctggccctgggct

SEQ ID NO: 2920 - RNA, 20 nt, synthetic construct
  source 1..20: mol_type = other RNA
gtctatctgcctggccctgg

SEQ ID NO: 2921 - RNA, 20 nt, synthetic construct
  source 1..20: mol_type = other RNA
gtctccctggctttagccac

SEQ ID NO: 2922 - RNA, 20 nt, synthetic construct
  source 1..20: mol_type = other RNA
gtctcccttgcgtcccgcct

SEQ ID NO: 2923 - RNA, 20 nt, synthetic construct
  source 1..20: mol_type = other RNA
gtctccttccctgccctgcc

SEQ ID NO: 2924 - RNA, 20 nt, synthetic construct
  source 1..20: mol_type = other RNA
gtctctctcctgagtccgga

SEQ ID NO: 2925 - RNA, 20 nt, synthetic construct
  source 1..20: mol_type = other RNA
gtctgcagcttgtggcctgg

SEQ ID NO: 2926 - RNA, 20 nt, synthetic construct
  source 1..20: mol_type = other RNA
gtctgggtcctctccgggca

SEQ ID NO: 2927 - RNA, 20 nt, synthetic construct
  source 1..20: mol_type = other RNA
gtctggtctatctgcctggc

SEQ ID NO: 2928 - RNA, 20 nt, synthetic construct
  source 1..20: mol_type = other RNA
gtcttcactcgctgggttcc

SEQ ID NO: 2929 - RNA, 20 nt, synthetic construct
  source 1..20: mol_type = other RNA
gtcttcctccactccctctt

SEQ ID NO: 2930 - RNA, 20 nt, synthetic construct
  source 1..20: mol_type = other RNA
gtgaagacggcatggggttg

SEQ ID NO: 2931 - RNA, 20 nt, synthetic construct
  source 1..20: mol_type = other RNA
gtgacaatggccagggccag

SEQ ID NO: 2932 - RNA, 20 nt, synthetic construct
  source 1..20: mol_type = other RNA
gtgacccaggccacaagctg

SEQ ID NO: 2933 - RNA, 20 nt, synthetic construct
  source 1..20: mol_type = other RNA
gtgacccgaatccacaggag

SEQ ID NO: 2934 - RNA, 20 nt, synthetic construct
  source 1..20: mol_type = other RNA
gtgagaggtgacccgaatcc

SEQ ID NO: 2935 - RNA, 20 nt, synthetic construct
  source 1..20: mol_type = other RNA
gtgagggaggagagatgccc

SEQ ID NO: 2936 - RNA, 20 nt, synthetic construct
  source 1..20: mol_type = other RNA
gtgatgatgcaggcctacaa

SEQ ID NO: 2937 - RNA, 20 nt, synthetic construct
  source 1..20: mol_type = other RNA
gtgatgtcctctgagcggat

SEQ ID NO: 2938 - RNA, 20 nt, synthetic construct
  source 1..20: mol_type = other RNA
gtgcagcgccgagaaggaag

SEQ ID NO: 2939 - RNA, 20 nt, synthetic construct
  source 1..20: mol_type = other RNA
gtgccatctctcgtttctta

SEQ ID NO: 2940 - RNA, 20 nt, synthetic construct
  source 1..20: mol_type = other RNA
gtgcccttgctgtgccgccg

SEQ ID NO: 2941 - RNA, 20 nt, synthetic construct
  source 1..20: mol_type = other RNA
gtgccgccggaactctgccc

SEQ ID NO: 2942 - RNA, 20 nt, synthetic construct
  source 1..20: mol_type = other RNA
gtgccgctttctgtctgcag

SEQ ID NO: 2943 - RNA, 20 nt, synthetic construct
  source 1..20: mol_type = other RNA
gtgctccggaaagagcatcc

SEQ ID NO: 2944 - RNA, 20 nt, synthetic construct
  source 1..20: mol_type = other RNA
gtgctgaccactctgcccca

SEQ ID NO: 2945 - RNA, 20 nt, synthetic construct
  source 1..20: mol_type = other RNA
gtgctgacccatgcagtcct

SEQ ID NO: 2946 - RNA, 20 nt, synthetic construct
  source 1..20: mol_type = other RNA
gtggaggaagacggaacctg

SEQ ID NO: 2947 - RNA, 20 nt, synthetic construct
  source 1..20: mol_type = other RNA
gtggattcgggtcacctctc

SEQ ID NO: 2948 - RNA, 20 nt, synthetic construct
  source 1..20: mol_type = other RNA
gtggcaaagcccagggccag

SEQ ID NO: 2949 - RNA, 20 nt, synthetic construct
  source 1..20: mol_type = other RNA
gtggcctgggtcacctctac

SEQ ID NO: 2950 - RNA, 20 nt, synthetic construct
  source 1..20: mol_type = other RNA
gtggctaaagccagggagac

SEQ ID NO: 2951 - RNA, 20 nt, synthetic construct
  source 1..20: mol_type = other RNA
gtggctaagcccagggccag

SEQ ID NO: 2952 - RNA, 20 nt, synthetic construct
  source 1..20: mol_type = other RNA
gtgggccagaggcggcgcag

SEQ ID NO: 2953 - RNA, 20 nt, synthetic construct
  source 1..20: mol_type = other RNA
gtggggtggtcgaaggggaa

SEQ ID NO: 2954 - RNA, 20 nt, synthetic construct
  source 1..20: mol_type = other RNA
gtggtcagcacagagtggct

SEQ ID NO: 2955 - RNA, 20 nt, synthetic construct
  source 1..20: mol_type = other RNA
gtggtccggactcaggagag

SEQ ID NO: 2956 - RNA, 20 nt, synthetic construct
  source 1..20: mol_type = other RNA
gtggtcgaaggggaatggta

SEQ ID NO: 2957 - RNA, 20 nt, synthetic construct
  source 1..20: mol_type = other RNA
gtggtgcagcgccgagaagg

SEQ ID NO: 2958 - RNA, 20 nt, synthetic construct
  source 1..20: mol_type = other RNA
gtgtcagcatagggtggcaa

SEQ ID NO: 2959 - RNA, 20 nt, synthetic construct
  source 1..20: mol_type = other RNA
gtgtccaggcaaagaaagca

SEQ ID NO: 2960 - RNA, 20 nt, synthetic construct
  source 1..20: mol_type = other RNA
gtgtctgggtcctctccggg

SEQ ID NO: 2961 - RNA, 20 nt, synthetic construct
  source 1..20: mol_type = other RNA
gtgttgctgcccaaggatgc

SEQ ID NO: 2962 - RNA, 20 nt, synthetic construct
  source 1..20: mol_type = other RNA
gttaaagcgactccaatgcg

SEQ ID NO: 2963 - RNA, 20 nt, synthetic construct
  source 1..20: mol_type = other RNA
gttagagggcagagttccgg

SEQ ID NO: 2964 - RNA, 20 nt, synthetic construct
  source 1..20: mol_type = other RNA
gttcaggagagggcagggca

SEQ ID NO: 2965 - RNA, 20 nt, synthetic construct
  source 1..20: mol_type = other RNA
gttcccttttccttctcctt

SEQ ID NO: 2966 - RNA, 20 nt, synthetic construct
  source 1..20: mol_type = other RNA
gttccggcggcacagcaagg

SEQ ID NO: 2967 - RNA, 20 nt, synthetic construct
  source 1..20: mol_type = other RNA
gttccgtcttcctccactcc

SEQ ID NO: 2968 - RNA, 20 nt, synthetic construct
  source 1..20: mol_type = other RNA
gttcctggccctgggctttg

SEQ ID NO: 2969 - RNA, 20 nt, synthetic construct
  source 1..20: mol_type = other RNA
gttctcctgtggattcgggt

SEQ ID NO: 2970 - RNA, 20 nt, synthetic construct
  source 1..20: mol_type = other RNA
gttgaagcggctccaattcg

SEQ ID NO: 2971 - RNA, 20 nt, synthetic construct
  source 1..20: mol_type = other RNA
gttgagcccctccagccggt

SEQ ID NO: 2972 - RNA, 20 nt, synthetic construct
  source 1..20: mol_type = other RNA
gttgctgcccaaggatgctc

SEQ ID NO: 2973 - RNA, 20 nt, synthetic construct
  source 1..20: mol_type = other RNA
gttgggtgagggaggagaga

SEQ ID NO: 2974 - RNA, 20 nt, synthetic construct
  source 1..20: mol_type = other RNA
gttgtccagaaaaacggtga

SEQ ID NO: 2975 - RNA, 20 nt, synthetic construct
  source 1..20: mol_type = other RNA
gtttccccttcccaggcagg

SEQ ID NO: 2976 - RNA, 20 nt, synthetic construct
  source 1..20: mol_type = other RNA
gtttcttaggatggccttct

SEQ ID NO: 2977 - RNA, 20 nt, synthetic construct
  source 1..20: mol_type = other RNA
gtttttctggacaaccccaa

SEQ ID NO: 2978 - RNA, 20 nt, synthetic construct
  source 1..20: mol_type = other RNA
taaagccagggagacggggt

SEQ ID NO: 2979 - RNA, 20 nt, synthetic construct
  source 1..20: mol_type = other RNA
taaagcgactccaatgcgga

SEQ ID NO: 2980 - RNA, 20 nt, synthetic construct
  source 1..20: mol_type = other RNA
taacgctgccgtctctctcc

SEQ ID NO: 2981 - RNA, 20 nt, synthetic construct
  source 1..20: mol_type = other RNA
taactggccctggctttggc

SEQ ID NO: 2982 - RNA, 20 nt, synthetic construct
  source 1..20: mol_type = other RNA
taagaaacgagagatggcac

SEQ ID NO: 2983 - RNA, 20 nt, synthetic construct
  source 1..20: mol_type = other RNA
taagcccagggccagttgaa

SEQ ID NO: 2984 - RNA, 20 nt, synthetic construct
  source 1..20: mol_type = other RNA
taaggaggactgcatgggtc

SEQ ID NO: 2985 - RNA, 20 nt, synthetic construct
  source 1..20: mol_type = other RNA
taaggaggcctggggcagag

SEQ ID NO: 2986 - RNA, 20 nt, synthetic construct
  source 1..20: mol_type = other RNA
taagggggactgggacgggg

SEQ ID NO: 2987 - RNA, 20 nt, synthetic construct
  source 1..20: mol_type = other RNA
taaggggggtaggggagctg

SEQ ID NO: 2988 - RNA, 20 nt, synthetic construct
  source 1..20: mol_type = other RNA
tacaagaaggggaggcggga

SEQ ID NO: 2989 - RNA, 20 nt, synthetic construct
  source 1..20: mol_type = other RNA
taccatccctccctcgactt

SEQ ID NO: 2990 - RNA, 20 nt, synthetic construct
  source 1..20: mol_type = other RNA
taccattccccttcgaccac

SEQ ID NO: 2991 - RNA, 20 nt, synthetic construct
  source 1..20: mol_type = other RNA
taccattccccttcgaccta

SEQ ID NO: 2992 - RNA, 20 nt, synthetic construct
  source 1..20: mol_type = other RNA
taccccccttacctctctag

SEQ ID NO: 2993 - RNA, 20 nt, synthetic construct
  source 1..20: mol_type = other RNA
taccccgtctccctggcttt

SEQ ID NO: 2994 - RNA, 20 nt, synthetic construct
  source 1..20: mol_type = other RNA
tacggctggcccagatcctt

SEQ ID NO: 2995 - RNA, 20 nt, synthetic construct
  source 1..20: mol_type = other RNA
tactctcttccgcattggag

SEQ ID NO: 2996 - RNA, 20 nt, synthetic construct
  source 1..20: mol_type = other RNA
tactggcttctgcgccgcct

SEQ ID NO: 2997 - RNA, 20 nt, synthetic construct
  source 1..20: mol_type = other RNA
tactttggggttgtccagaa

SEQ ID NO: 2998 - RNA, 20 nt, synthetic construct
  source 1..20: mol_type = other RNA
tagaccagactgagctatgg

SEQ ID NO: 2999 - RNA, 20 nt, synthetic construct
  source 1..20: mol_type = other RNA
tagagaggtaaggggggtag

SEQ ID NO: 3000 - RNA, 20 nt, synthetic construct
  source 1..20: mol_type = other RNA
tagagctcaaagtggtccgg

SEQ ID NO: 3001 - RNA, 20 nt, synthetic construct
  source 1..20: mol_type = other RNA
tagagggcagagttccggcg

SEQ ID NO: 3002 - RNA, 20 nt, synthetic construct
  source 1..20: mol_type = other RNA
tagaggtgacccaggccaca

SEQ ID NO: 3003 - RNA, 20 nt, synthetic construct
  source 1..20: mol_type = other RNA
tagcacagactagagaggta

SEQ ID NO: 3004 - RNA, 20 nt, synthetic construct
  source 1..20: mol_type = other RNA
tagccacctctccatcctct

SEQ ID NO: 3005 - RNA, 20 nt, synthetic construct
  source 1..20: mol_type = other RNA
tagccactctgtgctgacca

SEQ ID NO: 3006 - RNA, 20 nt, synthetic construct
  source 1..20: mol_type = other RNA
tagctcagtctggtctatct

SEQ ID NO: 3007 - RNA, 20 nt, synthetic construct
  source 1..20: mol_type = other RNA
taggatggccttctccgacg

SEQ ID NO: 3008 - RNA, 20 nt, synthetic construct
  source 1..20: mol_type = other RNA
taggcctgcatcatcaccgt

SEQ ID NO: 3009 - RNA, 20 nt, synthetic construct
  source 1..20: mol_type = other RNA
taggggagctgcccaaatga

SEQ ID NO: 3010 - RNA, 20 nt, synthetic construct
  source 1..20: mol_type = other RNA
tagggtggcaaagcccaggg

SEQ ID NO: 3011 - RNA, 20 nt, synthetic construct
  source 1..20: mol_type = other RNA
taggtcgaaggggaatggta

SEQ ID NO: 3012 - RNA, 20 nt, synthetic construct
  source 1..20: mol_type = other RNA
tatctgcctggccctggcca

SEQ ID NO: 3013 - RNA, 20 nt, synthetic construct
  source 1..20: mol_type = other RNA
tatgctgacaccccgtccca

SEQ ID NO: 3014 - RNA, 20 nt, synthetic construct
  source 1..20: mol_type = other RNA
tatgggagctggctcaggtt

SEQ ID NO: 3015 - RNA, 20 nt, synthetic construct
  source 1..20: mol_type = other RNA
tcaaagtggtccggactcag

SEQ ID NO: 3016 - RNA, 20 nt, synthetic construct
  source 1..20: mol_type = other RNA
tcaacatcggaagaggggaa

SEQ ID NO: 3017 - RNA, 20 nt, synthetic construct
  source 1..20: mol_type = other RNA
tcaactggccctgggcttag

SEQ ID NO: 3018 - RNA, 20 nt, synthetic construct
  source 1..20: mol_type = other RNA
tcacccaaccccatgccgtc

SEQ ID NO: 3019 - RNA, 20 nt, synthetic construct
  source 1..20: mol_type = other RNA
tcaccgtttttctggacaac

SEQ ID NO: 3020 - RNA, 20 nt, synthetic construct
  source 1..20: mol_type = other RNA
tcacctctacggctggccca

SEQ ID NO: 3021 - RNA, 20 nt, synthetic construct
  source 1..20: mol_type = other RNA
tcacctctcactcctttcat

SEQ ID NO: 3022 - RNA, 20 nt, synthetic construct
  source 1..20: mol_type = other RNA
tcacgtggtgcagcgccgag

SEQ ID NO: 3023 - RNA, 20 nt, synthetic construct
  source 1..20: mol_type = other RNA
tcactcctttcatttgggca

SEQ ID NO: 3024 - RNA, 20 nt, synthetic construct
  source 1..20: mol_type = other RNA
tcactcgctgggttcccttt

SEQ ID NO: 3025 - RNA, 20 nt, synthetic construct
  source 1..20: mol_type = other RNA
tcactttgcgctgccctcct

SEQ ID NO: 3026 - RNA, 20 nt, synthetic construct
  source 1..20: mol_type = other RNA
tcagagaaagcaggacctgc

SEQ ID NO: 3027 - RNA, 20 nt, synthetic construct
  source 1..20: mol_type = other RNA
tcagaggacatcacgtggtg

SEQ ID NO: 3028 - RNA, 20 nt, synthetic construct
  source 1..20: mol_type = other RNA
tcagcacagagtggctaagc

SEQ ID NO: 3029 - RNA, 20 nt, synthetic construct
  source 1..20: mol_type = other RNA
tcagcacaggctgccaaagc

SEQ ID NO: 3030 - RNA, 20 nt, synthetic construct
  source 1..20: mol_type = other RNA
tcagcatagggtggcaaagc

SEQ ID NO: 3031 - RNA, 20 nt, synthetic construct
  source 1..20: mol_type = other RNA
tcaggagagagacggcagcg

SEQ ID NO: 3032 - RNA, 20 nt, synthetic construct
  source 1..20: mol_type = other RNA
tcaggagagggcagggcagg

SEQ ID NO: 3033 - RNA, 20 nt, synthetic construct
  source 1..20: mol_type = other RNA
tcaggttcaggagagggcag

SEQ ID NO: 3034 - RNA, 20 nt, synthetic construct
  source 1..20: mol_type = other RNA
tcaggttccgtcttcctcca

SEQ ID NO: 3035 - RNA, 20 nt, synthetic construct
  source 1..20: mol_type = other RNA
tcagtctggtctatctgcct

SEQ ID NO: 3036 - RNA, 20 nt, synthetic construct
  source 1..20: mol_type = other RNA
tcatcaccgtttttctggac

SEQ ID NO: 3037 - RNA, 20 nt, synthetic construct
  source 1..20: mol_type = other RNA
tcatttgggcagctccccta

SEQ ID NO: 3038 - RNA, 20 nt, synthetic construct
  source 1..20: mol_type = other RNA
tccaatgcggaagagagtag

SEQ ID NO: 3039 - RNA, 20 nt, synthetic construct
  source 1..20: mol_type = other RNA
tccaattcggaagtggggtg

SEQ ID NO: 3040 - RNA, 20 nt, synthetic construct
  source 1..20: mol_type = other RNA
tccacaggagaacggggtgt

SEQ ID NO: 3041 - RNA, 20 nt, synthetic construct
  source 1..20: mol_type = other RNA
tccactccctcttccccttg

SEQ ID NO: 3042 - RNA, 20 nt, synthetic construct
  source 1..20: mol_type = other RNA
tccagaaaaacggtgatgat

SEQ ID NO: 3043 - RNA, 20 nt, synthetic construct
  source 1..20: mol_type = other RNA
tccagccggtcctggacttt

SEQ ID NO: 3044 - RNA, 20 nt, synthetic construct
  source 1..20: mol_type = other RNA
tccaggaccggctggagggg

SEQ ID NO: 3045 - RNA, 20 nt, synthetic construct
  source 1..20: mol_type = other RNA
tccaggcaaagaaagcaaga

SEQ ID NO: 3046 - RNA, 20 nt, synthetic construct
  source 1..20: mol_type = other RNA
tccatcctcttgctttcttt

SEQ ID NO: 3047 - RNA, 20 nt, synthetic construct
  source 1..20: mol_type = other RNA
tcccaggcaggtcctgcttt

SEQ ID NO: 3048 - RNA, 20 nt, synthetic construct
  source 1..20: mol_type = other RNA
tcccagtcccccttaccatt

SEQ ID NO: 3049 - RNA, 20 nt, synthetic construct
  source 1..20: mol_type = other RNA
tcccatagctcagtctggtc

SEQ ID NO: 3050 - RNA, 20 nt, synthetic construct
  source 1..20: mol_type = other RNA
tcccccttaccattcccctt

SEQ ID NO: 3051 - RNA, 20 nt, synthetic construct
  source 1..20: mol_type = other RNA
tccccgtgtctgggtcctct

SEQ ID NO: 3052 - RNA, 20 nt, synthetic construct
  source 1..20: mol_type = other RNA
tcccctaccccccttacctc

SEQ ID NO: 3053 - RNA, 20 nt, synthetic construct
  source 1..20: mol_type = other RNA
tcccctcttccgatgttgag

SEQ ID NO: 3054 - RNA, 20 nt, synthetic construct
  source 1..20: mol_type = other RNA
tcccctgggcctgtgccgct

SEQ ID NO: 3055 - RNA, 20 nt, synthetic construct
  source 1..20: mol_type = other RNA
tccccttcccaggcaggtcc

SEQ ID NO: 3056 - RNA, 20 nt, synthetic construct
  source 1..20: mol_type = other RNA
tccccttcgaccaccccact

SEQ ID NO: 3057 - RNA, 20 nt, synthetic construct
  source 1..20: mol_type = other RNA
tccccttcgacctactctct

SEQ ID NO: 3058 - RNA, 20 nt, synthetic construct
  source 1..20: mol_type = other RNA
tccccttcttgtaggcctgc

SEQ ID NO: 3059 - RNA, 20 nt, synthetic construct
  source 1..20: mol_type = other RNA
tccccttgctctctgctgtg

SEQ ID NO: 3060 - RNA, 20 nt, synthetic construct
  source 1..20: mol_type = other RNA
tcccgcctccccttcttgta

SEQ ID NO: 3061 - RNA, 20 nt, synthetic construct
  source 1..20: mol_type = other RNA
tccctcacccaaccccatgc

SEQ ID NO: 3062 - RNA, 20 nt, synthetic construct
  source 1..20: mol_type = other RNA
tccctccctcgacttcccct

SEQ ID NO: 3063 - RNA, 20 nt, synthetic construct
  source 1..20: mol_type = other RNA
tccctcgacttcccctcttc

SEQ ID NO: 3064 - RNA, 20 nt, synthetic construct
  source 1..20: mol_type = other RNA
tccctcttccccttgctctc

SEQ ID NO: 3065 - RNA, 20 nt, synthetic construct
  source 1..20: mol_type = other RNA
tccctgccctgccctctcct

SEQ ID NO: 3066 - RNA, 20 nt, synthetic construct
  source 1..20: mol_type = other RNA
tccctgccgcctccttcagg

SEQ ID NO: 3067 - RNA, 20 nt, synthetic construct
  source 1..20: mol_type = other RNA
tccctggctttagccacctc

SEQ ID NO: 3068 - RNA, 20 nt, synthetic construct
  source 1..20: mol_type = other RNA
tcccttgcgtcccgcctccc

SEQ ID NO: 3069 - RNA, 20 nt, synthetic construct
  source 1..20: mol_type = other RNA
tcccttttccttctccttct

SEQ ID NO: 3070 - RNA, 20 nt, synthetic construct
  source 1..20: mol_type = other RNA
tccgaattggagccgcttca

SEQ ID NO: 3071 - RNA, 20 nt, synthetic construct
  source 1..20: mol_type = other RNA
tccgacggatgtctcccttg

SEQ ID NO: 3072 - RNA, 20 nt, synthetic construct
  source 1..20: mol_type = other RNA
tccgatgttgagcccctcca

SEQ ID NO: 3073 - RNA, 20 nt, synthetic construct
  source 1..20: mol_type = other RNA
tccgcattggagtcgcttta

SEQ ID NO: 3074 - RNA, 20 nt, synthetic construct
  source 1..20: mol_type = other RNA
tccgctcagaggacatcacg

SEQ ID NO: 3075 - RNA, 20 nt, synthetic construct
  source 1..20: mol_type = other RNA
tccggaaagagcatccttgg

SEQ ID NO: 3076 - RNA, 20 nt, synthetic construct
  source 1..20: mol_type = other RNA
tccggaccactttgagctct

SEQ ID NO: 3077 - RNA, 20 nt, synthetic construct
  source 1..20: mol_type = other RNA
tccggactcaggagagagac

SEQ ID NO: 3078 - RNA, 20 nt, synthetic construct
  source 1..20: mol_type = other RNA
tccggagcacttccttctcg

SEQ ID NO: 3079 - RNA, 20 nt, synthetic construct
  source 1..20: mol_type = other RNA
tccggcggcacagcaagggc

SEQ ID NO: 3080 - RNA, 20 nt, synthetic construct
  source 1..20: mol_type = other RNA
tccgggcatctctcctccct

SEQ ID NO: 3081 - RNA, 20 nt, synthetic construct
  source 1..20: mol_type = other RNA
tccgtcggagaaggccatcc

SEQ ID NO: 3082 - RNA, 20 nt, synthetic construct
  source 1..20: mol_type = other RNA
tccgtcttcctccactccct

SEQ ID NO: 3083 - RNA, 20 nt, synthetic construct
  source 1..20: mol_type = other RNA
tcctaagaaacgagagatgg

SEQ ID NO: 3084 - RNA, 20 nt, synthetic construct
  source 1..20: mol_type = other RNA
tcctccactccctcttcccc

SEQ ID NO: 3085 - RNA, 20 nt, synthetic construct
  source 1..20: mol_type = other RNA
tcctccccgtgtctgggtcc

SEQ ID NO: 3086 - RNA, 20 nt, synthetic construct
  source 1..20: mol_type = other RNA
tcctccctcacccaacccca

SEQ ID NO: 3087 - RNA, 20 nt, synthetic construct
  source 1..20: mol_type = other RNA
tcctccttaccatccctccc

SEQ ID NO: 3088 - RNA, 20 nt, synthetic construct
  source 1..20: mol_type = other RNA
tcctctccgggcatctctcc

SEQ ID NO: 3089 - RNA, 20 nt, synthetic construct
  source 1..20: mol_type = other RNA
tcctctcgcccccgagtgcc

SEQ ID NO: 3090 - RNA, 20 nt, synthetic construct
  source 1..20: mol_type = other RNA
tcctctgagcggatcctccc

SEQ ID NO: 3091 - RNA, 20 nt, synthetic construct
  source 1..20: mol_type = other RNA
tcctcttgctttctttgcct

SEQ ID NO: 3092 - RNA, 20 nt, synthetic construct
  source 1..20: mol_type = other RNA
tcctgaacctgagccagctc

SEQ ID NO: 3093 - RNA, 20 nt, synthetic construct
  source 1..20: mol_type = other RNA
tcctgagtccggaccacttt

SEQ ID NO: 3094 - RNA, 20 nt, synthetic construct
  source 1..20: mol_type = other RNA
tcctgctttctctgacctgc

SEQ ID NO: 3095 - RNA, 20 nt, synthetic construct
  source 1..20: mol_type = other RNA
tcctggactttgtctccttc

SEQ ID NO: 3096 - RNA, 20 nt, synthetic construct
  source 1..20: mol_type = other RNA
tcctggccctgggctttgcc

SEQ ID NO: 3097 - RNA, 20 nt, synthetic construct
  source 1..20: mol_type = other RNA
tcctgtggattcgggtcacc

SEQ ID NO: 3098 - RNA, 20 nt, synthetic construct
  source 1..20: mol_type = other RNA
tccttaccatccctccctcg

SEQ ID NO: 3099 - RNA, 20 nt, synthetic construct
  source 1..20: mol_type = other RNA
tccttaccattccccttcga

SEQ ID NO: 3100 - RNA, 20 nt, synthetic construct
  source 1..20: mol_type = other RNA
tccttcaggttccgtcttcc

SEQ ID NO: 3101 - RNA, 20 nt, synthetic construct
  source 1..20: mol_type = other RNA
tccttccctgccctgccctc

SEQ ID NO: 3102 - RNA, 20 nt, synthetic construct
  source 1..20: mol_type = other RNA
tccttccctgccgcctcctt

SEQ ID NO: 3103 - RNA, 20 nt, synthetic construct
  source 1..20: mol_type = other RNA
tccttctccttctggggcct

SEQ ID NO: 3104 - RNA, 20 nt, synthetic construct
  source 1..20: mol_type = other RNA
tccttctcggcgctgcacca

SEQ ID NO: 3105 - RNA, 20 nt, synthetic construct
  source 1..20: mol_type = other RNA
tccttctggggcctgtgcca

SEQ ID NO: 3106 - RNA, 20 nt, synthetic construct
  source 1..20: mol_type = other RNA
tccttgggcagcaacacagc

SEQ ID NO: 3107 - RNA, 20 nt, synthetic construct
  source 1..20: mol_type = other RNA
tcctttcatttgggcagctc

SEQ ID NO: 3108 - RNA, 20 nt, synthetic construct
  source 1..20: mol_type = other RNA
tcgaaggggaatggtaagga

SEQ ID NO: 3109 - RNA, 20 nt, synthetic construct
  source 1..20: mol_type = other RNA
tcgaaggggaatggtaaggg

SEQ ID NO: 3110 - RNA, 20 nt, synthetic construct
  source 1..20: mol_type = other RNA
tcgaccaccccacttccgaa

SEQ ID NO: 3111 - RNA, 20 nt, synthetic construct
  source 1..20: mol_type = other RNA
tcgacctactctcttccgca

SEQ ID NO: 3112 - RNA, 20 nt, synthetic construct
  source 1..20: mol_type = other RNA
tcgacttcccctcttccgat

SEQ ID NO: 3113 - RNA, 20 nt, synthetic construct
  source 1..20: mol_type = other RNA
tcgagggagggatggtaagg

SEQ ID NO: 3114 - RNA, 20 nt, synthetic construct
  source 1..20: mol_type = other RNA
tcgcccccgagtgcccttgc

SEQ ID NO: 3115 - RNA, 20 nt, synthetic construct
  source 1..20: mol_type = other RNA
tcgctgggttcccttttcct

SEQ ID NO: 3116 - RNA, 20 nt, synthetic construct
  source 1..20: mol_type = other RNA
tcgctttaactggccctggc

SEQ ID NO: 3117 - RNA, 20 nt, synthetic construct
  source 1..20: mol_type = other RNA
tcggaagaggggaagtcgag

SEQ ID NO: 3118 - RNA, 20 nt, synthetic construct
  source 1..20: mol_type = other RNA
tcggaagtggggtggtcgaa

SEQ ID NO: 3119 - RNA, 20 nt, synthetic construct
  source 1..20: mol_type = other RNA
tcggagaaggccatcctaag

SEQ ID NO: 3120 - RNA, 20 nt, synthetic construct
  source 1..20: mol_type = other RNA
tcggcgctgcaccacgtgat

SEQ ID NO: 3121 - RNA, 20 nt, synthetic construct
  source 1..20: mol_type = other RNA
tcgggggcgagaggagggca

SEQ ID NO: 3122 - RNA, 20 nt, synthetic construct
  source 1..20: mol_type = other RNA
tcgggtcacctctcactcct

SEQ ID NO: 3123 - RNA, 20 nt, synthetic construct
  source 1..20: mol_type = other RNA
tcgttcctggccctgggctt

SEQ ID NO: 3124 - RNA, 20 nt, synthetic construct
  source 1..20: mol_type = other RNA
tcgtttcttaggatggcctt

SEQ ID NO: 3125 - RNA, 20 nt, synthetic construct
  source 1..20: mol_type = other RNA
tctaacgctgccgtctctct

SEQ ID NO: 3126 - RNA, 20 nt, synthetic construct
  source 1..20: mol_type = other RNA
tctacggctggcccagatcc

SEQ ID NO: 3127 - RNA, 20 nt, synthetic construct
  source 1..20: mol_type = other RNA
tctactggcttctgcgccgc

SEQ ID NO: 3128 - RNA, 20 nt, synthetic construct
  source 1..20: mol_type = other RNA
tctatctgcctggccctggc

SEQ ID NO: 3129 - RNA, 20 nt, synthetic construct
  source 1..20: mol_type = other RNA
tctcactcctttcatttggg

SEQ ID NO: 3130 - RNA, 20 nt, synthetic construct
  source 1..20: mol_type = other RNA
tctccatcctcttgctttct

SEQ ID NO: 3131 - RNA, 20 nt, synthetic construct
  source 1..20: mol_type = other RNA
tctcccctgggcctgtgccg

SEQ ID NO: 3132 - RNA, 20 nt, synthetic construct
  source 1..20: mol_type = other RNA
tctccctggctttagccacc

SEQ ID NO: 3133 - RNA, 20 nt, synthetic construct
  source 1..20: mol_type = other RNA
tctcccttgcgtcccgcctc

SEQ ID NO: 3134 - RNA, 20 nt, synthetic construct
  source 1..20: mol_type = other RNA
tctccgacggatgtctccct

SEQ ID NO: 3135 - RNA, 20 nt, synthetic construct
  source 1..20: mol_type = other RNA
tctccgggcatctctcctcc

SEQ ID NO: 3136 - RNA, 20 nt, synthetic construct
  source 1..20: mol_type = other RNA
tctcctccctcacccaaccc

SEQ ID NO: 3137 - RNA, 20 nt, synthetic construct
  source 1..20: mol_type = other RNA
tctcctgaacctgagccagc

SEQ ID NO: 3138 - RNA, 20 nt, synthetic construct
  source 1..20: mol_type = other RNA
tctcctgagtccggaccact

SEQ ID NO: 3139 - RNA, 20 nt, synthetic construct
  source 1..20: mol_type = other RNA
tctcctgtggattcgggtca

SEQ ID NO: 3140 - RNA, 20 nt, synthetic construct
  source 1..20: mol_type = other RNA
tctccttccctgccctgccc

SEQ ID NO: 3141 - RNA, 20 nt, synthetic construct
  source 1..20: mol_type = other RNA
tctccttctggggcctgtgc

SEQ ID NO: 3142 - RNA, 20 nt, synthetic construct
  source 1..20: mol_type = other RNA
tctcgcccccgagtgccctt

SEQ ID NO: 3143 - RNA, 20 nt, synthetic construct
  source 1..20: mol_type = other RNA
tctcggcgctgcaccacgtg

SEQ ID NO: 3144 - RNA, 20 nt, synthetic construct
  source 1..20: mol_type = other RNA
tctcgtttcttaggatggcc

SEQ ID NO: 3145 - RNA, 20 nt, synthetic construct
  source 1..20: mol_type = other RNA
tctctcccctgggcctgtgc

SEQ ID NO: 3146 - RNA, 20 nt, synthetic construct
  source 1..20: mol_type = other RNA
tctctcctccctcacccaac

SEQ ID NO: 3147 - RNA, 20 nt, synthetic construct
  source 1..20: mol_type = other RNA
tctctcctgagtccggacca

SEQ ID NO: 3148 - RNA, 20 nt, synthetic construct
  source 1..20: mol_type = other RNA
tctctcgtttcttaggatgg

SEQ ID NO: 3149 - RNA, 20 nt, synthetic construct
  source 1..20: mol_type = other RNA
tctctctcctgagtccggac

SEQ ID NO: 3150 - RNA, 20 nt, synthetic construct
  source 1..20: mol_type = other RNA
tctctgacctgcattctctc

SEQ ID NO: 3151 - RNA, 20 nt, synthetic construct
  source 1..20: mol_type = other RNA
tctctgctgtgttgctgccc

SEQ ID NO: 3152 - RNA, 20 nt, synthetic construct
  source 1..20: mol_type = other RNA
tctcttccgcattggagtcg

SEQ ID NO: 3153 - RNA, 20 nt, synthetic construct
  source 1..20: mol_type = other RNA
tctgacctgcattctctccc

SEQ ID NO: 3154 - RNA, 20 nt, synthetic construct
  source 1..20: mol_type = other RNA
tctgagcggatcctccccgt

SEQ ID NO: 3155 - RNA, 20 nt, synthetic construct
  source 1..20: mol_type = other RNA
tctgcagcttgtggcctggg

SEQ ID NO: 3156 - RNA, 20 nt, synthetic construct
  source 1..20: mol_type = other RNA
tctgccccaggcctccttac

SEQ ID NO: 3157 - RNA, 20 nt, synthetic construct
  source 1..20: mol_type = other RNA
tctgccctctaacgctgccg

SEQ ID NO: 3158 - RNA, 20 nt, synthetic construct
  source 1..20: mol_type = other RNA
tctgcctggccctggccatt

SEQ ID NO: 3159 - RNA, 20 nt, synthetic construct
  source 1..20: mol_type = other RNA
tctgcgccgcctctggccca

SEQ ID NO: 3160 - RNA, 20 nt, synthetic construct
  source 1..20: mol_type = other RNA
tctgctgtgttgctgcccaa

SEQ ID NO: 3161 - RNA, 20 nt, synthetic construct
  source 1..20: mol_type = other RNA
tctggacaaccccaaagtac

SEQ ID NO: 3162 - RNA, 20 nt, synthetic construct
  source 1..20: mol_type = other RNA
tctggcccactgtttcccct

SEQ ID NO: 3163 - RNA, 20 nt, synthetic construct
  source 1..20: mol_type = other RNA
tctgggccagccgtagaggt

SEQ ID NO: 3164 - RNA, 20 nt, synthetic construct
  source 1..20: mol_type = other RNA
tctggggcctgtgccatctc

SEQ ID NO: 3165 - RNA, 20 nt, synthetic construct
  source 1..20: mol_type = other RNA
tctgggtcctctccgggcat

SEQ ID NO: 3166 - RNA, 20 nt, synthetic construct
  source 1..20: mol_type = other RNA
tctggtctatctgcctggcc

SEQ ID NO: 3167 - RNA, 20 nt, synthetic construct
  source 1..20: mol_type = other RNA
tctgtctgcagcttgtggcc

SEQ ID NO: 3168 - RNA, 20 nt, synthetic construct
  source 1..20: mol_type = other RNA
tctgtgctgaccactctgcc

SEQ ID NO: 3169 - RNA, 20 nt, synthetic construct
  source 1..20: mol_type = other RNA
tcttaggatggccttctccg

SEQ ID NO: 3170 - RNA, 20 nt, synthetic construct
  source 1..20: mol_type = other RNA
tcttcactcgctgggttccc

SEQ ID NO: 3171 - RNA, 20 nt, synthetic construct
  source 1..20: mol_type = other RNA
tcttccccttgctctctgct

SEQ ID NO: 3172 - RNA, 20 nt, synthetic construct
  source 1..20: mol_type = other RNA
tcttccgatgttgagcccct

SEQ ID NO: 3173 - RNA, 20 nt, synthetic construct
  source 1..20: mol_type = other RNA
tcttccgcattggagtcgct

SEQ ID NO: 3174 - RNA, 20 nt, synthetic construct
  source 1..20: mol_type = other RNA
tcttcctccactccctcttc

SEQ ID NO: 3175 - RNA, 20 nt, synthetic construct
  source 1..20: mol_type = other RNA
tcttgctttctttgcctgga

SEQ ID NO: 3176 - RNA, 20 nt, synthetic construct
  source 1..20: mol_type = other RNA
tcttgtaggcctgcatcatc

SEQ ID NO: 3177 - RNA, 20 nt, synthetic construct
  source 1..20: mol_type = other RNA
tctttccggagcacttcctt

SEQ ID NO: 3178 - RNA, 20 nt, synthetic construct
  source 1..20: mol_type = other RNA
tctttgcctggacaccccgt

SEQ ID NO: 3179 - RNA, 20 nt, synthetic construct
  source 1..20: mol_type = other RNA
tgaaaggagtgagaggtgac

SEQ ID NO: 3180 - RNA, 20 nt, synthetic construct
  source 1..20: mol_type = other RNA
tgaacctgagccagctccca

SEQ ID NO: 3181 - RNA, 20 nt, synthetic construct
  source 1..20: mol_type = other RNA
tgaagacggcatggggttgg

SEQ ID NO: 3182 - RNA, 20 nt, synthetic construct
  source 1..20: mol_type = other RNA
tgaagcggctccaattcgga

SEQ ID NO: 3183 - RNA, 20 nt, synthetic construct
  source 1..20: mol_type = other RNA
tgaaggaggcggcagggaag

SEQ ID NO: 3184 - RNA, 20 nt, synthetic construct
  source 1..20: mol_type = other RNA
tgacaatggccagggccagg

SEQ ID NO: 3185 - RNA, 20 nt, synthetic construct
  source 1..20: mol_type = other RNA
tgacaccccgtcccagtccc

SEQ ID NO: 3186 - RNA, 20 nt, synthetic construct
  source 1..20: mol_type = other RNA
tgaccactctgccccaggcc

SEQ ID NO: 3187 - RNA, 20 nt, synthetic construct
  source 1..20: mol_type = other RNA
tgacccaggccacaagctgc

SEQ ID NO: 3188 - RNA, 20 nt, synthetic construct
  source 1..20: mol_type = other RNA
tgacccatgcagtcctcctt

SEQ ID NO: 3189 - RNA, 20 nt, synthetic construct
  source 1..20: mol_type = other RNA
tgacccgaatccacaggaga

SEQ ID NO: 3190 - RNA, 20 nt, synthetic construct
  source 1..20: mol_type = other RNA
tgacctgcattctctcccct

SEQ ID NO: 3191 - RNA, 20 nt, synthetic construct
  source 1..20: mol_type = other RNA
tgagaggtgacccgaatcca

SEQ ID NO: 3192 - RNA, 20 nt, synthetic construct
  source 1..20: mol_type = other RNA
tgagccagctcccatagctc

SEQ ID NO: 3193 - RNA, 20 nt, synthetic construct
  source 1..20: mol_type = other RNA
tgagcccctccagccggtcc

SEQ ID NO: 3194 - RNA, 20 nt, synthetic construct
  source 1..20: mol_type = other RNA
tgagcggatcctccccgtgt

SEQ ID NO: 3195 - RNA, 20 nt, synthetic construct
  source 1..20: mol_type = other RNA
tgagctatgggagctggctc

SEQ ID NO: 3196 - RNA, 20 nt, synthetic construct
  source 1..20: mol_type = other RNA
tgagctctactggcttctgc

SEQ ID NO: 3197 - RNA, 20 nt, synthetic construct
  source 1..20: mol_type = other RNA
tgagggaggagagatgcccg

SEQ ID NO: 3198 - RNA, 20 nt, synthetic construct
  source 1..20: mol_type = other RNA
tgagtccggaccactttgag

SEQ ID NO: 3199 - RNA, 20 nt, synthetic construct
  source 1..20: mol_type = other RNA
tgatgatgcaggcctacaag

SEQ ID NO: 3200 - RNA, 20 nt, synthetic construct
  source 1..20: mol_type = other RNA
tgatgcaggcctacaagaag

SEQ ID NO: 3201 - RNA, 20 nt, synthetic construct
  source 1..20: mol_type = other RNA
tgatgtcctctgagcggatc

SEQ ID NO: 3202 - RNA, 20 nt, synthetic construct
  source 1..20: mol_type = other RNA
tgcaccacgtgatgtcctct

SEQ ID NO: 3203 - RNA, 20 nt, synthetic construct
  source 1..20: mol_type = other RNA
tgcagacagaaagcggcaca

SEQ ID NO: 3204 - RNA, 20 nt, synthetic construct
  source 1..20: mol_type = other RNA
tgcagcgccgagaaggaagt

SEQ ID NO: 3205 - RNA, 20 nt, synthetic construct
  source 1..20: mol_type = other RNA
tgcagcttgtggcctgggtc

SEQ ID NO: 3206 - RNA, 20 nt, synthetic construct
  source 1..20: mol_type = other RNA
tgcaggcctacaagaagggg

SEQ ID NO: 3207 - RNA, 20 nt, synthetic construct
  source 1..20: mol_type = other RNA
tgcaggtcagagaaagcagg

SEQ ID NO: 3208 - RNA, 20 nt, synthetic construct
  source 1..20: mol_type = other RNA
tgcagtcctccttaccatcc

SEQ ID NO: 3209 - RNA, 20 nt, synthetic construct
  source 1..20: mol_type = other RNA
tgcatcatcaccgtttttct

SEQ ID NO: 3210 - RNA, 20 nt, synthetic construct
  source 1..20: mol_type = other RNA
tgcatgggtcagcacaggct

SEQ ID NO: 3211 - RNA, 20 nt, synthetic construct
  source 1..20: mol_type = other RNA
tgcattctctcccctgggcc

SEQ ID NO: 3212 - RNA, 20 nt, synthetic construct
  source 1..20: mol_type = other RNA
tgccaaagccagggccagtt

SEQ ID NO: 3213 - RNA, 20 nt, synthetic construct
  source 1..20: mol_type = other RNA
tgccaccctatgctgacacc

SEQ ID NO: 3214 - RNA, 20 nt, synthetic construct
  source 1..20: mol_type = other RNA
tgccatctctcgtttcttag

SEQ ID NO: 3215 - RNA, 20 nt, synthetic construct
  source 1..20: mol_type = other RNA
tgcccaaatgaaaggagtga

SEQ ID NO: 3216 - RNA, 20 nt, synthetic construct
  source 1..20: mol_type = other RNA
tgcccaaggatgctctttcc

SEQ ID NO: 3217 - RNA, 20 nt, synthetic construct
  source 1..20: mol_type = other RNA
tgccccaggcctccttacca

SEQ ID NO: 3218 - RNA, 20 nt, synthetic construct
  source 1..20: mol_type = other RNA
tgcccggagaggacccagac

SEQ ID NO: 3219 - RNA, 20 nt, synthetic construct
  source 1..20: mol_type = other RNA
tgccctcctctcgcccccga

SEQ ID NO: 3220 - RNA, 20 nt, synthetic construct
  source 1..20: mol_type = other RNA
tgccctctaacgctgccgtc

SEQ ID NO: 3221 - RNA, 20 nt, synthetic construct
  source 1..20: mol_type = other RNA
tgccctctcctgaacctgag

SEQ ID NO: 3222 - RNA, 20 nt, synthetic construct
  source 1..20: mol_type = other RNA
tgccctgccctctcctgaac

SEQ ID NO: 3223 - RNA, 20 nt, synthetic construct
  source 1..20: mol_type = other RNA
tgcccttgctgtgccgccgg

SEQ ID NO: 3224 - RNA, 20 nt, synthetic construct
  source 1..20: mol_type = other RNA
tgccgccggaactctgccct

SEQ ID NO: 3225 - RNA, 20 nt, synthetic construct
  source 1..20: mol_type = other RNA
tgccgcctccttcaggttcc

SEQ ID NO: 3226 - RNA, 20 nt, synthetic construct
  source 1..20: mol_type = other RNA
tgccgctttctgtctgcagc

SEQ ID NO: 3227 - RNA, 20 nt, synthetic construct
  source 1..20: mol_type = other RNA
tgccgtctctctcctgagtc

SEQ ID NO: 3228 - RNA, 20 nt, synthetic construct
  source 1..20: mol_type = other RNA
tgccgtcttcactcgctggg

SEQ ID NO: 3229 - RNA, 20 nt, synthetic construct
  source 1..20: mol_type = other RNA
tgcctggacaccccgttctc

SEQ ID NO: 3230 - RNA, 20 nt, synthetic construct
  source 1..20: mol_type = other RNA
tgcctggccctggccattgt

SEQ ID NO: 3231 - RNA, 20 nt, synthetic construct
  source 1..20: mol_type = other RNA
tgcctgggaaggggaaacag

SEQ ID NO: 3232 - RNA, 20 nt, synthetic construct
  source 1..20: mol_type = other RNA
tgcgccgcctctggcccact

SEQ ID NO: 3233 - RNA, 20 nt, synthetic construct
  source 1..20: mol_type = other RNA
tgcgctgccctcctctcgcc

SEQ ID NO: 3234 - RNA, 20 nt, synthetic construct
  source 1..20: mol_type = other RNA
tgcggaagagagtaggtcga

SEQ ID NO: 3235 - RNA, 20 nt, synthetic construct
  source 1..20: mol_type = other RNA
tgcgtcccgcctccccttct

SEQ ID NO: 3236 - RNA, 20 nt, synthetic construct
  source 1..20: mol_type = other RNA
tgctccggaaagagcatcct

SEQ ID NO: 3237 - RNA, 20 nt, synthetic construct
  source 1..20: mol_type = other RNA
tgctctctgctgtgttgctg

SEQ ID NO: 3238 - RNA, 20 nt, synthetic construct
  source 1..20: mol_type = other RNA
tgctctttccggagcacttc

SEQ ID NO: 3239 - RNA, 20 nt, synthetic construct
  source 1..20: mol_type = other RNA
tgctgacaccccgtcccagt

SEQ ID NO: 3240 - RNA, 20 nt, synthetic construct
  source 1..20: mol_type = other RNA
tgctgaccactctgccccag

SEQ ID NO: 3241 - RNA, 20 nt, synthetic construct
  source 1..20: mol_type = other RNA
tgctgacccatgcagtcctc

SEQ ID NO: 3242 - RNA, 20 nt, synthetic construct
  source 1..20: mol_type = other RNA
tgctgcccaaggatgctctt

SEQ ID NO: 3243 - RNA, 20 nt, synthetic construct
  source 1..20: mol_type = other RNA
tgctgtgccgccggaactct

SEQ ID NO: 3244 - RNA, 20 nt, synthetic construct
  source 1..20: mol_type = other RNA
tgctgtgttgctgcccaagg

SEQ ID NO: 3245 - RNA, 20 nt, synthetic construct
  source 1..20: mol_type = other RNA
tgctttctctgacctgcatt

SEQ ID NO: 3246 - RNA, 20 nt, synthetic construct
  source 1..20: mol_type = other RNA
tgctttctttgcctggacac

SEQ ID NO: 3247 - RNA, 20 nt, synthetic construct
  source 1..20: mol_type = other RNA
tggacaaccccaaagtaccc

SEQ ID NO: 3248 - RNA, 20 nt, synthetic construct
  source 1..20: mol_type = other RNA
tggacaccccgttctcctgt

SEQ ID NO: 3249 - RNA, 20 nt, synthetic construct
  source 1..20: mol_type = other RNA
tggactttgtctccttccct

SEQ ID NO: 3250 - RNA, 20 nt, synthetic construct
  source 1..20: mol_type = other RNA
tggagaggtggctaaagcca

SEQ ID NO: 3251 - RNA, 20 nt, synthetic construct
  source 1..20: mol_type = other RNA
tggagccgcttcaactggcc

SEQ ID NO: 3252 - RNA, 20 nt, synthetic construct
  source 1..20: mol_type = other RNA
tggaggaagacggaacctga

SEQ ID NO: 3253 - RNA, 20 nt, synthetic construct
  source 1..20: mol_type = other RNA
tggaggggctcaacatcgga

SEQ ID NO: 3254 - RNA, 20 nt, synthetic construct
  source 1..20: mol_type = other RNA
tggagtcgctttaactggcc

SEQ ID NO: 3255 - RNA, 20 nt, synthetic construct
  source 1..20: mol_type = other RNA
tggattcgggtcacctctca

SEQ ID NO: 3256 - RNA, 20 nt, synthetic construct
  source 1..20: mol_type = other RNA
tggcaaagcccagggccagg

SEQ ID NO: 3257 - RNA, 20 nt, synthetic construct
  source 1..20: mol_type = other RNA
tggcacaggccccagaagga

SEQ ID NO: 3258 - RNA, 20 nt, synthetic construct
  source 1..20: mol_type = other RNA
tggcagcctgtgctgaccca

SEQ ID NO: 3259 - RNA, 20 nt, synthetic construct
  source 1..20: mol_type = other RNA
tggccagggccaggcagata

SEQ ID NO: 3260 - RNA, 20 nt, synthetic construct
  source 1..20: mol_type = other RNA
tggccattgtcactttgcgc

SEQ ID NO: 3261 - RNA, 20 nt, synthetic construct
  source 1..20: mol_type = other RNA
tggcccactgtttccccttc

SEQ ID NO: 3262 - RNA, 20 nt, synthetic construct
  source 1..20: mol_type = other RNA
tggcccagatccttccctgc

SEQ ID NO: 3263 - RNA, 20 nt, synthetic construct
  source 1..20: mol_type = other RNA
tggccctggccattgtcact

SEQ ID NO: 3264 - RNA, 20 nt, synthetic construct
  source 1..20: mol_type = other RNA
tggccctggctttggcagcc

SEQ ID NO: 3265 - RNA, 20 nt, synthetic construct
  source 1..20: mol_type = other RNA
tggccctgggcttagccact

SEQ ID NO: 3266 - RNA, 20 nt, synthetic construct
  source 1..20: mol_type = other RNA
tggccctgggctttgccacc

SEQ ID NO: 3267 - RNA, 20 nt, synthetic construct
  source 1..20: mol_type = other RNA
tggcctgggtcacctctacg

SEQ ID NO: 3268 - RNA, 20 nt, synthetic construct
  source 1..20: mol_type = other RNA
tggccttctccgacggatgt

SEQ ID NO: 3269 - RNA, 20 nt, synthetic construct
  source 1..20: mol_type = other RNA
tggctaaagccagggagacg

SEQ ID NO: 3270 - RNA, 20 nt, synthetic construct
  source 1..20: mol_type = other RNA
tggctaagcccagggccagt

SEQ ID NO: 3271 - RNA, 20 nt, synthetic construct
  source 1..20: mol_type = other RNA
tggctcaggttcaggagagg

SEQ ID NO: 3272 - RNA, 20 nt, synthetic construct
  source 1..20: mol_type = other RNA
tggcttctgcgccgcctctg

SEQ ID NO: 3273 - RNA, 20 nt, synthetic construct
  source 1..20: mol_type = other RNA
tggctttagccacctctcca

SEQ ID NO: 3274 - RNA, 20 nt, synthetic construct
  source 1..20: mol_type = other RNA
tggctttggcagcctgtgct

SEQ ID NO: 3275 - RNA, 20 nt, synthetic construct
  source 1..20: mol_type = other RNA
tgggaaggggaaacagtggg

SEQ ID NO: 3276 - RNA, 20 nt, synthetic construct
  source 1..20: mol_type = other RNA
tgggacggggtgtcagcata

SEQ ID NO: 3277 - RNA, 20 nt, synthetic construct
  source 1..20: mol_type = other RNA
tgggagctggctcaggttca

SEQ ID NO: 3278 - RNA, 20 nt, synthetic construct
  source 1..20: mol_type = other RNA
tgggcagcaacacagcagag

SEQ ID NO: 3279 - RNA, 20 nt, synthetic construct
  source 1..20: mol_type = other RNA
tgggcagctcccctaccccc

SEQ ID NO: 3280 - RNA, 20 nt, synthetic construct
  source 1..20: mol_type = other RNA
tgggccagaggcggcgcaga

SEQ ID NO: 3281 - RNA, 20 nt, synthetic construct
  source 1..20: mol_type = other RNA
tgggccagccgtagaggtga

SEQ ID NO: 3282 - RNA, 20 nt, synthetic construct
  source 1..20: mol_type = other RNA
tgggcctgtgccgctttctg

SEQ ID NO: 3283 - RNA, 20 nt, synthetic construct
  source 1..20: mol_type = other RNA
tgggcttagccactctgtgc

SEQ ID NO: 3284 - RNA, 20 nt, synthetic construct
  source 1..20: mol_type = other RNA
tgggctttgccaccctatgc

SEQ ID NO: 3285 - RNA, 20 nt, synthetic construct
  source 1..20: mol_type = other RNA
tggggcagagtggtcagcac

SEQ ID NO: 3286 - RNA, 20 nt, synthetic construct
  source 1..20: mol_type = other RNA
tggggcctgtgccatctctc

SEQ ID NO: 3287 - RNA, 20 nt, synthetic construct
  source 1..20: mol_type = other RNA
tggggtggtcgaaggggaat

SEQ ID NO: 3288 - RNA, 20 nt, synthetic construct
  source 1..20: mol_type = other RNA
tggggttgggtgagggagga

SEQ ID NO: 3289 - RNA, 20 nt, synthetic construct
  source 1..20: mol_type = other RNA
tggggttgtccagaaaaacg

SEQ ID NO: 3290 - RNA, 20 nt, synthetic construct
  source 1..20: mol_type = other RNA
tgggtcacctctacggctgg

SEQ ID NO: 3291 - RNA, 20 nt, synthetic construct
  source 1..20: mol_type = other RNA
tgggtcagcacaggctgcca

SEQ ID NO: 3292 - RNA, 20 nt, synthetic construct
  source 1..20: mol_type = other RNA
tgggtcctctccgggcatct

SEQ ID NO: 3293 - RNA, 20 nt, synthetic construct
  source 1..20: mol_type = other RNA
tgggtgagggaggagagatg

SEQ ID NO: 3294 - RNA, 20 nt, synthetic construct
  source 1..20: mol_type = other RNA
tgggttcccttttccttctc

SEQ ID NO: 3295 - RNA, 20 nt, synthetic construct
  source 1..20: mol_type = other RNA
tggtaaggaggactgcatgg

SEQ ID NO: 3296 - RNA, 20 nt, synthetic construct
  source 1..20: mol_type = other RNA
tggtaaggaggcctggggca

SEQ ID NO: 3297 - RNA, 20 nt, synthetic construct
  source 1..20: mol_type = other RNA
tggtaagggggactgggacg

SEQ ID NO: 3298 - RNA, 20 nt, synthetic construct
  source 1..20: mol_type = other RNA
tggtcagcacagagtggcta

SEQ ID NO: 3299 - RNA, 20 nt, synthetic construct
  source 1..20: mol_type = other RNA
tggtccggactcaggagaga

SEQ ID NO: 3300 - RNA, 20 nt, synthetic construct
  source 1..20: mol_type = other RNA
tggtcgaaggggaatggtaa

SEQ ID NO: 3301 - RNA, 20 nt, synthetic construct
  source 1..20: mol_type = other RNA
tggtctatctgcctggccct

SEQ ID NO: 3302 - RNA, 20 nt, synthetic construct
  source 1..20: mol_type = other RNA
tggtgcagcgccgagaagga

SEQ ID NO: 3303 - RNA, 20 nt, synthetic construct
  source 1..20: mol_type = other RNA
tgtaggcctgcatcatcacc

SEQ ID NO: 3304 - RNA, 20 nt, synthetic construct
  source 1..20: mol_type = other RNA
tgtcactttgcgctgccctc

SEQ ID NO: 3305 - RNA, 20 nt, synthetic construct
  source 1..20: mol_type = other RNA
tgtcagcatagggtggcaaa

SEQ ID NO: 3306 - RNA, 20 nt, synthetic construct
  source 1..20: mol_type = other RNA
tgtccagaaaaacggtgatg

SEQ ID NO: 3307 - RNA, 20 nt, synthetic construct
  source 1..20: mol_type = other RNA
tgtccaggcaaagaaagcaa

SEQ ID NO: 3308 - RNA, 20 nt, synthetic construct
  source 1..20: mol_type = other RNA
tgtcctctgagcggatcctc

SEQ ID NO: 3309 - RNA, 20 nt, synthetic construct
  source 1..20: mol_type = other RNA
tgtctcccttgcgtcccgcc

SEQ ID NO: 3310 - RNA, 20 nt, synthetic construct
  source 1..20: mol_type = other RNA
tgtctccttccctgccctgc

SEQ ID NO: 3311 - RNA, 20 nt, synthetic construct
  source 1..20: mol_type = other RNA
tgtctgcagcttgtggcctg

SEQ ID NO: 3312 - RNA, 20 nt, synthetic construct
  source 1..20: mol_type = other RNA
tgtctgggtcctctccgggc

SEQ ID NO: 3313 - RNA, 20 nt, synthetic construct
  source 1..20: mol_type = other RNA
tgtgccatctctcgtttctt

SEQ ID NO: 3314 - RNA, 20 nt, synthetic construct
  source 1..20: mol_type = other RNA
tgtgccgccggaactctgcc

SEQ ID NO: 3315 - RNA, 20 nt, synthetic construct
  source 1..20: mol_type = other RNA
tgtgccgctttctgtctgca

SEQ ID NO: 3316 - RNA, 20 nt, synthetic construct
  source 1..20: mol_type = other RNA
tgtgctgaccactctgcccc

SEQ ID NO: 3317 - RNA, 20 nt, synthetic construct
  source 1..20: mol_type = other RNA
tgtgctgacccatgcagtcc

SEQ ID NO: 3318 - RNA, 20 nt, synthetic construct
  source 1..20: mol_type = other RNA
tgtggattcgggtcacctct

SEQ ID NO: 3319 - RNA, 20 nt, synthetic construct
  source 1..20: mol_type = other RNA
tgtggcctgggtcacctcta

SEQ ID NO: 3320 - RNA, 20 nt, synthetic construct
  source 1..20: mol_type = other RNA
tgtgttgctgcccaaggatg

SEQ ID NO: 3321 - RNA, 20 nt, synthetic construct
  source 1..20: mol_type = other RNA
tgttgagcccctccagccgg

SEQ ID NO: 3322 - RNA, 20 nt, synthetic construct
  source 1..20: mol_type = other RNA
tgttgctgcccaaggatgct

SEQ ID NO: 3323 - RNA, 20 nt, synthetic construct
  source 1..20: mol_type = other RNA
tgtttccccttcccaggcag

SEQ ID NO: 3324 - RNA, 20 nt, synthetic construct
  source 1..20: mol_type = other RNA
ttaaagcgactccaatgcgg

SEQ ID NO: 3325 - RNA, 20 nt, synthetic construct
  source 1..20: mol_type = other RNA
ttaactggccctggctttgg

SEQ ID NO: 3326 - RNA, 20 nt, synthetic construct
  source 1..20: mol_type = other RNA
ttaccatccctccctcgact

SEQ ID NO: 3327 - RNA, 20 nt, synthetic construct
  source 1..20: mol_type = other RNA
ttaccattccccttcgacca

SEQ ID NO: 3328 - RNA, 20 nt, synthetic construct
  source 1..20: mol_type = other RNA
ttaccattccccttcgacct

SEQ ID NO: 3329 - RNA, 20 nt, synthetic construct
  source 1..20: mol_type = other RNA
ttagagggcagagttccggc

SEQ ID NO: 3330 - RNA, 20 nt, synthetic construct
  source 1..20: mol_type = other RNA
ttagccacctctccatcctc

SEQ ID NO: 3331 - RNA, 20 nt, synthetic construct
  source 1..20: mol_type = other RNA
ttagccactctgtgctgacc

SEQ ID NO: 3332 - RNA, 20 nt, synthetic construct
  source 1..20: mol_type = other RNA
ttaggatggccttctccgac

SEQ ID NO: 3333 - RNA, 20 nt, synthetic construct
  source 1..20: mol_type = other RNA
ttcaactggccctgggctta

SEQ ID NO: 3334 - RNA, 20 nt, synthetic construct
  source 1..20: mol_type = other RNA
ttcactcgctgggttccctt

SEQ ID NO: 3335 - RNA, 20 nt, synthetic construct
  source 1..20: mol_type = other RNA
ttcaggagagggcagggcag

SEQ ID NO: 3336 - RNA, 20 nt, synthetic construct
  source 1..20: mol_type = other RNA
ttcaggttccgtcttcctcc

SEQ ID NO: 3337 - RNA, 20 nt, synthetic construct
  source 1..20: mol_type = other RNA
ttcatttgggcagctcccct

SEQ ID NO: 3338 - RNA, 20 nt, synthetic construct
  source 1..20: mol_type = other RNA
ttcccaggcaggtcctgctt

SEQ ID NO: 3339 - RNA, 20 nt, synthetic construct
  source 1..20: mol_type = other RNA
ttcccctcttccgatgttga

SEQ ID NO: 3340 - RNA, 20 nt, synthetic construct
  source 1..20: mol_type = other RNA
ttccccttcccaggcaggtc

SEQ ID NO: 3341 - RNA, 20 nt, synthetic construct
  source 1..20: mol_type = other RNA
ttccccttcgaccaccccac

SEQ ID NO: 3342 - RNA, 20 nt, synthetic construct
  source 1..20: mol_type = other RNA
ttccccttcgacctactctc

SEQ ID NO: 3343 - RNA, 20 nt, synthetic construct
  source 1..20: mol_type = other RNA
ttccccttgctctctgctgt

SEQ ID NO: 3344 - RNA, 20 nt, synthetic construct
  source 1..20: mol_type = other RNA
ttccctgccctgccctctcc

SEQ ID NO: 3345 - RNA, 20 nt, synthetic construct
  source 1..20: mol_type = other RNA
ttccctgccgcctccttcag

SEQ ID NO: 3346 - RNA, 20 nt, synthetic construct
  source 1..20: mol_type = other RNA
ttcccttttccttctccttc

SEQ ID NO: 3347 - RNA, 20 nt, synthetic construct
  source 1..20: mol_type = other RNA
ttccgaattggagccgcttc

SEQ ID NO: 3348 - RNA, 20 nt, synthetic construct
  source 1..20: mol_type = other RNA
ttccgatgttgagcccctcc

SEQ ID NO: 3349 - RNA, 20 nt, synthetic construct
  source 1..20: mol_type = other RNA
ttccgcattggagtcgcttt

SEQ ID NO: 3350 - RNA, 20 nt, synthetic construct
  source 1..20: mol_type = other RNA
ttccggagcacttccttctc

SEQ ID NO: 3351 - RNA, 20 nt, synthetic construct
  source 1..20: mol_type = other RNA
ttccggcggcacagcaaggg

SEQ ID NO: 3352 - RNA, 20 nt, synthetic construct
  source 1..20: mol_type = other RNA
ttccgtcttcctccactccc

SEQ ID NO: 3353 - RNA, 20 nt, synthetic construct
  source 1..20: mol_type = other RNA
ttcctccactccctcttccc

SEQ ID NO: 3354 - RNA, 20 nt, synthetic construct
  source 1..20: mol_type = other RNA
ttcctggccctgggctttgc

SEQ ID NO: 3355 - RNA, 20 nt, synthetic construct
  source 1..20: mol_type = other RNA
ttccttctccttctggggcc

SEQ ID NO: 3356 - RNA, 20 nt, synthetic construct
  source 1..20: mol_type = other RNA
ttccttctcggcgctgcacc

SEQ ID NO: 3357 - RNA, 20 nt, synthetic construct
  source 1..20: mol_type = other RNA
ttcgaccaccccacttccga

SEQ ID NO: 3358 - RNA, 20 nt, synthetic construct
  source 1..20: mol_type = other RNA
ttcgacctactctcttccgc

SEQ ID NO: 3359 - RNA, 20 nt, synthetic construct
  source 1..20: mol_type = other RNA
ttcggaagtggggtggtcga

SEQ ID NO: 3360 - RNA, 20 nt, synthetic construct
  source 1..20: mol_type = other RNA
ttcgggtcacctctcactcc

SEQ ID NO: 3361 - RNA, 20 nt, synthetic construct
  source 1..20: mol_type = other RNA
ttctccgacggatgtctccc

SEQ ID NO: 3362 - RNA, 20 nt, synthetic construct
  source 1..20: mol_type = other RNA
ttctcctgtggattcgggtc

SEQ ID NO: 3363 - RNA, 20 nt, synthetic construct
  source 1..20: mol_type = other RNA
ttctccttctggggcctgtg

SEQ ID NO: 3364 - RNA, 20 nt, synthetic construct
  source 1..20: mol_type = other RNA
ttctcggcgctgcaccacgt

SEQ ID NO: 3365 - RNA, 20 nt, synthetic construct
  source 1..20: mol_type = other RNA
ttctctcccctgggcctgtg

SEQ ID NO: 3366 - RNA, 20 nt, synthetic construct
  source 1..20: mol_type = other RNA
ttctctgacctgcattctct

SEQ ID NO: 3367 - RNA, 20 nt, synthetic construct
  source 1..20: mol_type = other RNA
ttctgcgccgcctctggccc

SEQ ID NO: 3368 - RNA, 20 nt, synthetic construct
  source 1..20: mol_type = other RNA
ttctggacaaccccaaagta

SEQ ID NO: 3369 - RNA, 20 nt, synthetic construct
  source 1..20: mol_type = other RNA
ttctggggcctgtgccatct

SEQ ID NO: 3370 - RNA, 20 nt, synthetic construct
  source 1..20: mol_type = other RNA
ttctgtctgcagcttgtggc

SEQ ID NO: 3371 - RNA, 20 nt, synthetic construct
  source 1..20: mol_type = other RNA
ttcttaggatggccttctcc

SEQ ID NO: 3372 - RNA, 20 nt, synthetic construct
  source 1..20: mol_type = other RNA
ttcttgtaggcctgcatcat

SEQ ID NO: 3373 - RNA, 20 nt, synthetic construct
  source 1..20: mol_type = other RNA
ttctttgcctggacaccccg

SEQ ID NO: 3374 - RNA, 20 nt, synthetic construct
  source 1..20: mol_type = other RNA
ttgaagcggctccaattcgg

SEQ ID NO: 3375 - RNA, 20 nt, synthetic construct
  source 1..20: mol_type = other RNA
ttgagcccctccagccggtc

SEQ ID NO: 3376 - RNA, 20 nt, synthetic construct
  source 1..20: mol_type = other RNA
ttgagctctactggcttctg

SEQ ID NO: 3377 - RNA, 20 nt, synthetic construct
  source 1..20: mol_type = other RNA
ttgccaccctatgctgacac

SEQ ID NO: 3378 - RNA, 20 nt, synthetic construct
  source 1..20: mol_type = other RNA
ttgcctggacaccccgttct

SEQ ID NO: 3379 - RNA, 20 nt, synthetic construct
  source 1..20: mol_type = other RNA
ttgcgctgccctcctctcgc

SEQ ID NO: 3380 - RNA, 20 nt, synthetic construct
  source 1..20: mol_type = other RNA
ttgcgtcccgcctccccttc

SEQ ID NO: 3381 - RNA, 20 nt, synthetic construct
  source 1..20: mol_type = other RNA
ttgctctctgctgtgttgct

SEQ ID NO: 3382 - RNA, 20 nt, synthetic construct
  source 1..20: mol_type = other RNA
ttgctgcccaaggatgctct

SEQ ID NO: 3383 - RNA, 20 nt, synthetic construct
  source 1..20: mol_type = other RNA
ttgctgtgccgccggaactc

SEQ ID NO: 3384 - RNA, 20 nt, synthetic construct
  source 1..20: mol_type = other RNA
ttgctttctttgcctggaca

SEQ ID NO: 3385 - RNA, 20 nt, synthetic construct
  source 1..20: mol_type = other RNA
ttggagccgcttcaactggc

SEQ ID NO: 3386 - RNA, 20 nt, synthetic construct
  source 1..20: mol_type = other RNA
ttggagtcgctttaactggc

SEQ ID NO: 3387 - RNA, 20 nt, synthetic construct
  source 1..20: mol_type = other RNA
ttggcagcctgtgctgaccc

SEQ ID NO: 3388 - RNA, 20 nt, synthetic construct
  source 1..20: mol_type = other RNA
ttgggcagcaacacagcaga

SEQ ID NO: 3389 - RNA, 20 nt, synthetic construct
  source 1..20: mol_type = other RNA
ttgggcagctcccctacccc

SEQ ID NO: 3390 - RNA, 20 nt, synthetic construct
  source 1..20: mol_type = other RNA
ttggggttgtccagaaaaac

SEQ ID NO: 3391 - RNA, 20 nt, synthetic construct
  source 1..20: mol_type = other RNA
ttgggtgagggaggagagat

SEQ ID NO: 3392 - RNA, 20 nt, synthetic construct
  source 1..20: mol_type = other RNA
ttgtaggcctgcatcatcac

SEQ ID NO: 3393 - RNA, 20 nt, synthetic construct
  source 1..20: mol_type = other RNA
ttgtcactttgcgctgccct

SEQ ID NO: 3394 - RNA, 20 nt, synthetic construct
  source 1..20: mol_type = other RNA
ttgtccagaaaaacggtgat

SEQ ID NO: 3395 - RNA, 20 nt, synthetic construct
  source 1..20: mol_type = other RNA
ttgtctccttccctgccctg

SEQ ID NO: 3396 - RNA, 20 nt, synthetic construct
  source 1..20: mol_type = other RNA
ttgtggcctgggtcacctct

SEQ ID NO: 3397 - RNA, 20 nt, synthetic construct
  source 1..20: mol_type = other RNA
tttaactggccctggctttg

SEQ ID NO: 3398 - RNA, 20 nt, synthetic construct
  source 1..20: mol_type = other RNA
tttagccacctctccatcct

SEQ ID NO: 3399 - RNA, 20 nt, synthetic construct
  source 1..20: mol_type = other RNA
tttcatttgggcagctcccc

SEQ ID NO: 3400 - RNA, 20 nt, synthetic construct
  source 1..20: mol_type = other RNA
tttccccttcccaggcaggt

SEQ ID NO: 3401 - RNA, 20 nt, synthetic construct
  source 1..20: mol_type = other RNA
tttccggagcacttccttct

SEQ ID NO: 3402 - RNA, 20 nt, synthetic construct
  source 1..20: mol_type = other RNA
tttccttctccttctggggc

SEQ ID NO: 3403 - RNA, 20 nt, synthetic construct
  source 1..20: mol_type = other RNA
tttctctgacctgcattctc

SEQ ID NO: 3404 - RNA, 20 nt, synthetic construct
  source 1..20: mol_type = other RNA
tttctggacaaccccaaagt

SEQ ID NO: 3405 - RNA, 20 nt, synthetic construct
  source 1..20: mol_type = other RNA
tttctgtctgcagcttgtgg

SEQ ID NO: 3406 - RNA, 20 nt, synthetic construct
  source 1..20: mol_type = other RNA
tttcttaggatggccttctc

SEQ ID NO: 3407 - RNA, 20 nt, synthetic construct
  source 1..20: mol_type = other RNA
tttctttgcctggacacccc

SEQ ID NO: 3408 - RNA, 20 nt, synthetic construct
  source 1..20: mol_type = other RNA
tttgagctctactggcttct

SEQ ID NO: 3409 - RNA, 20 nt, synthetic construct
  source 1..20: mol_type = other RNA
tttgccaccctatgctgaca

SEQ ID NO: 3410 - RNA, 20 nt, synthetic construct
  source 1..20: mol_type = other RNA
tttgcctggacaccccgttc

SEQ ID NO: 3411 - RNA, 20 nt, synthetic construct
  source 1..20: mol_type = other RNA
tttgcgctgccctcctctcg

SEQ ID NO: 3412 - RNA, 20 nt, synthetic construct
  source 1..20: mol_type = other RNA
tttggcagcctgtgctgacc

SEQ ID NO: 3413 - RNA, 20 nt, synthetic construct
  source 1..20: mol_type = other RNA
tttgggcagctcccctaccc

SEQ ID NO: 3414 - RNA, 20 nt, synthetic construct
  source 1..20: mol_type = other RNA
tttggggttgtccagaaaaa

SEQ ID NO: 3415 - RNA, 20 nt, synthetic construct
  source 1..20: mol_type = other RNA
tttgtctccttccctgccct

SEQ ID NO: 3416 - RNA, 20 nt, synthetic construct
  source 1..20: mol_type = other RNA
ttttccttctccttctgggg

SEQ ID NO: 3417 - RNA, 20 nt, synthetic construct
  source 1..20: mol_type = other RNA
ttttctggacaaccccaaag

SEQ ID NO: 3418 - RNA, 20 nt, synthetic construct
  source 1..20: mol_type = other RNA
tttttctggacaaccccaaa

SEQ ID NO: 3419 - RNA, 21 nt, synthetic construct
  source 1..21: mol_type = other RNA
aaaaacggtgatgatgcaggc

SEQ ID NO: 3420 - RNA, 21 nt, synthetic construct
  source 1..21: mol_type = other RNA
aaaacggtgatgatgcaggcc

SEQ ID NO: 3421 - RNA, 21 nt, synthetic construct
  source 1..21: mol_type = other RNA
aaaagggaacccagcgagtga

SEQ ID NO: 3422 - RNA, 21 nt, synthetic construct
  source 1..21: mol_type = other RNA
aaacagtgggccagaggcggc

SEQ ID NO: 3423 - RNA, 21 nt, synthetic construct
  source 1..21: mol_type = other RNA
aaacgagagatggcacaggcc

SEQ ID NO: 3424 - RNA, 21 nt, synthetic construct
  source 1..21: mol_type = other RNA
aaacggtgatgatgcaggcct

SEQ ID NO: 3425 - RNA, 21 nt, synthetic construct
  source 1..21: mol_type = other RNA
aaagaaagcaagaggatggag

SEQ ID NO: 3426 - RNA, 21 nt, synthetic construct
  source 1..21: mol_type = other RNA
aaagagcatccttgggcagca

SEQ ID NO: 3427 - RNA, 21 nt, synthetic construct
  source 1..21: mol_type = other RNA
aaagcaagaggatggagaggt

SEQ ID NO: 3428 - RNA, 21 nt, synthetic construct
  source 1..21: mol_type = other RNA
aaagcaggacctgcctgggaa

SEQ ID NO: 3429 - RNA, 21 nt, synthetic construct
  source 1..21: mol_type = other RNA
aaagccagggagacggggtac

SEQ ID NO: 3430 - RNA, 21 nt, synthetic construct
  source 1..21: mol_type = other RNA
aaagccagggccagttaaagc

SEQ ID NO: 3431 - RNA, 21 nt, synthetic construct
  source 1..21: mol_type = other RNA
aaagcgactccaatgcggaag

SEQ ID NO: 3432 - RNA, 21 nt, synthetic construct
  source 1..21: mol_type = other RNA
aaagcggcacaggcccagggg

SEQ ID NO: 3433 - RNA, 21 nt, synthetic construct
  source 1..21: mol_type = other RNA
aaaggagtgagaggtgacccg

SEQ ID NO: 3434 - RNA, 21 nt, synthetic construct
  source 1..21: mol_type = other RNA
aaagggaacccagcgagtgaa

SEQ ID NO: 3435 - RNA, 21 nt, synthetic construct
  source 1..21: mol_type = other RNA
aaagtaccccgtctccctggc

SEQ ID NO: 3436 - RNA, 21 nt, synthetic construct
  source 1..21: mol_type = other RNA
aaagtccaggaccggctggag

SEQ ID NO: 3437 - RNA, 21 nt, synthetic construct
  source 1..21: mol_type = other RNA
aaagtgacaatggccagggcc

SEQ ID NO: 3438 - RNA, 21 nt, synthetic construct
  source 1..21: mol_type = other RNA
aaagtggtccggactcaggag

SEQ ID NO: 3439 - RNA, 21 nt, synthetic construct
  source 1..21: mol_type = other RNA
aaatgaaaggagtgagaggtg

SEQ ID NO: 3440 - RNA, 21 nt, synthetic construct
  source 1..21: mol_type = other RNA
aacacagcagagagcaagggg

SEQ ID NO: 3441 - RNA, 21 nt, synthetic construct
  source 1..21: mol_type = other RNA
aacagtgggccagaggcggcg

SEQ ID NO: 3442 - RNA, 21 nt, synthetic construct
  source 1..21: mol_type = other RNA
aacatcggaagaggggaagtc

SEQ ID NO: 3443 - RNA, 21 nt, synthetic construct
  source 1..21: mol_type = other RNA
aacccagcgagtgaagacggc

SEQ ID NO: 3444 - RNA, 21 nt, synthetic construct
  source 1..21: mol_type = other RNA
aaccccaaagtaccccgtctc

SEQ ID NO: 3445 - RNA, 21 nt, synthetic construct
  source 1..21: mol_type = other RNA
aaccccatgccgtcttcactc

SEQ ID NO: 3446 - RNA, 21 nt, synthetic construct
  source 1..21: mol_type = other RNA
aacctgaaggaggcggcaggg

SEQ ID NO: 3447 - RNA, 21 nt, synthetic construct
  source 1..21: mol_type = other RNA
aacctgagccagctcccatag

SEQ ID NO: 3448 - RNA, 21 nt, synthetic construct
  source 1..21: mol_type = other RNA
aacgagagatggcacaggccc

SEQ ID NO: 3449 - RNA, 21 nt, synthetic construct
  source 1..21: mol_type = other RNA
aacgctgccgtctctctcctg

SEQ ID NO: 3450 - RNA, 21 nt, synthetic construct
  source 1..21: mol_type = other RNA
aacggggtgtccaggcaaaga

SEQ ID NO: 3451 - RNA, 21 nt, synthetic construct
  source 1..21: mol_type = other RNA
aacggtgatgatgcaggccta

SEQ ID NO: 3452 - RNA, 21 nt, synthetic construct
  source 1..21: mol_type = other RNA
aactctgccctctaacgctgc

SEQ ID NO: 3453 - RNA, 21 nt, synthetic construct
  source 1..21: mol_type = other RNA
aactggccctggctttggcag

SEQ ID NO: 3454 - RNA, 21 nt, synthetic construct
  source 1..21: mol_type = other RNA
aactggccctgggcttagcca

SEQ ID NO: 3455 - RNA, 21 nt, synthetic construct
  source 1..21: mol_type = other RNA
aagaaacgagagatggcacag

SEQ ID NO: 3456 - RNA, 21 nt, synthetic construct
  source 1..21: mol_type = other RNA
aagaaagcaagaggatggaga

SEQ ID NO: 3457 - RNA, 21 nt, synthetic construct
  source 1..21: mol_type = other RNA
aagaaggggaggcgggacgca

SEQ ID NO: 3458 - RNA, 21 nt, synthetic construct
  source 1..21: mol_type = other RNA
aagacggaacctgaaggaggc

SEQ ID NO: 3459 - RNA, 21 nt, synthetic construct
  source 1..21: mol_type = other RNA
aagacggcatggggttgggtg

SEQ ID NO: 3460 - RNA, 21 nt, synthetic construct
  source 1..21: mol_type = other RNA
aagagagtaggtcgaagggga

SEQ ID NO: 3461 - RNA, 21 nt, synthetic construct
  source 1..21: mol_type = other RNA
aagagcatccttgggcagcaa

SEQ ID NO: 3462 - RNA, 21 nt, synthetic construct
  source 1..21: mol_type = other RNA
aagaggatggagaggtggcta

SEQ ID NO: 3463 - RNA, 21 nt, synthetic construct
  source 1..21: mol_type = other RNA
aagagggagtggaggaagacg

SEQ ID NO: 3464 - RNA, 21 nt, synthetic construct
  source 1..21: mol_type = other RNA
aagaggggaagtcgagggagg

SEQ ID NO: 3465 - RNA, 21 nt, synthetic construct
  source 1..21: mol_type = other RNA
aagcaagaggatggagaggtg

SEQ ID NO: 3466 - RNA, 21 nt, synthetic construct
  source 1..21: mol_type = other RNA
aagcaggacctgcctgggaag

SEQ ID NO: 3467 - RNA, 21 nt, synthetic construct
  source 1..21: mol_type = other RNA
aagccagggagacggggtact

SEQ ID NO: 3468 - RNA, 21 nt, synthetic construct
  source 1..21: mol_type = other RNA
aagccagggccagttaaagcg

SEQ ID NO: 3469 - RNA, 21 nt, synthetic construct
  source 1..21: mol_type = other RNA
aagccagtagagctcaaagtg

SEQ ID NO: 3470 - RNA, 21 nt, synthetic construct
  source 1..21: mol_type = other RNA
aagcccagggccagttgaagc

SEQ ID NO: 3471 - RNA, 21 nt, synthetic construct
  source 1..21: mol_type = other RNA
aagcgactccaatgcggaaga

SEQ ID NO: 3472 - RNA, 21 nt, synthetic construct
  source 1..21: mol_type = other RNA
aagcggcacaggcccagggga

SEQ ID NO: 3473 - RNA, 21 nt, synthetic construct
  source 1..21: mol_type = other RNA
aagcggctccaattcggaagt

SEQ ID NO: 3474 - RNA, 21 nt, synthetic construct
  source 1..21: mol_type = other RNA
aagctgcagacagaaagcggc

SEQ ID NO: 3475 - RNA, 21 nt, synthetic construct
  source 1..21: mol_type = other RNA
aaggaaaagggaacccagcga

SEQ ID NO: 3476 - RNA, 21 nt, synthetic construct
  source 1..21: mol_type = other RNA
aaggaagtgctccggaaagag

SEQ ID NO: 3477 - RNA, 21 nt, synthetic construct
  source 1..21: mol_type = other RNA
aaggagaaggaaaagggaacc

SEQ ID NO: 3478 - RNA, 21 nt, synthetic construct
  source 1..21: mol_type = other RNA
aaggagacaaagtccaggacc

SEQ ID NO: 3479 - RNA, 21 nt, synthetic construct
  source 1..21: mol_type = other RNA
aaggaggactgcatgggtcag

SEQ ID NO: 3480 - RNA, 21 nt, synthetic construct
  source 1..21: mol_type = other RNA
aaggaggcctggggcagagtg

SEQ ID NO: 3481 - RNA, 21 nt, synthetic construct
  source 1..21: mol_type = other RNA
aaggaggcggcagggaaggat

SEQ ID NO: 3482 - RNA, 21 nt, synthetic construct
  source 1..21: mol_type = other RNA
aaggagtgagaggtgacccga

SEQ ID NO: 3483 - RNA, 21 nt, synthetic construct
  source 1..21: mol_type = other RNA
aaggatctgggccagccgtag

SEQ ID NO: 3484 - RNA, 21 nt, synthetic construct
  source 1..21: mol_type = other RNA
aaggatgctctttccggagca

SEQ ID NO: 3485 - RNA, 21 nt, synthetic construct
  source 1..21: mol_type = other RNA
aaggccatcctaagaaacgag

SEQ ID NO: 3486 - RNA, 21 nt, synthetic construct
  source 1..21: mol_type = other RNA
aagggaacccagcgagtgaag

SEQ ID NO: 3487 - RNA, 21 nt, synthetic construct
  source 1..21: mol_type = other RNA
aagggagacatccgtcggaga

SEQ ID NO: 3488 - RNA, 21 nt, synthetic construct
  source 1..21: mol_type = other RNA
aagggcactcgggggcgagag

SEQ ID NO: 3489 - RNA, 21 nt, synthetic construct
  source 1..21: mol_type = other RNA
aaggggaaacagtgggccaga

SEQ ID NO: 3490 - RNA, 21 nt, synthetic construct
  source 1..21: mol_type = other RNA
aaggggaagagggagtggagg

SEQ ID NO: 3491 - RNA, 21 nt, synthetic construct
  source 1..21: mol_type = other RNA
aaggggaatggtaaggaggcc

SEQ ID NO: 3492 - RNA, 21 nt, synthetic construct
  source 1..21: mol_type = other RNA
aaggggaatggtaagggggac

SEQ ID NO: 3493 - RNA, 21 nt, synthetic construct
  source 1..21: mol_type = other RNA
aaggggaggcgggacgcaagg

SEQ ID NO: 3494 - RNA, 21 nt, synthetic construct
  source 1..21: mol_type = other RNA
aagggggactgggacggggtg

SEQ ID NO: 3495 - RNA, 21 nt, synthetic construct
  source 1..21: mol_type = other RNA
aaggggggtaggggagctgcc

SEQ ID NO: 3496 - RNA, 21 nt, synthetic construct
  source 1..21: mol_type = other RNA
aagtaccccgtctccctggct

SEQ ID NO: 3497 - RNA, 21 nt, synthetic construct
  source 1..21: mol_type = other RNA
aagtccaggaccggctggagg

SEQ ID NO: 3498 - RNA, 21 nt, synthetic construct
  source 1..21: mol_type = other RNA
aagtcgagggagggatggtaa

SEQ ID NO: 3499 - RNA, 21 nt, synthetic construct
  source 1..21: mol_type = other RNA
aagtgacaatggccagggcca

SEQ ID NO: 3500 - RNA, 21 nt, synthetic construct
  source 1..21: mol_type = other RNA
aagtgctccggaaagagcatc

SEQ ID NO: 3501 - RNA, 21 nt, synthetic construct
  source 1..21: mol_type = other RNA
aagtggggtggtcgaagggga

SEQ ID NO: 3502 - RNA, 21 nt, synthetic construct
  source 1..21: mol_type = other RNA
aagtggtccggactcaggaga

SEQ ID NO: 3503 - RNA, 21 nt, synthetic construct
  source 1..21: mol_type = other RNA
aatccacaggagaacggggtg

SEQ ID NO: 3504 - RNA, 21 nt, synthetic construct
  source 1..21: mol_type = other RNA
aatgaaaggagtgagaggtga

SEQ ID NO: 3505 - RNA, 21 nt, synthetic construct
  source 1..21: mol_type = other RNA
aatgcaggtcagagaaagcag

SEQ ID NO: 3506 - RNA, 21 nt, synthetic construct
  source 1..21: mol_type = other RNA
aatgcggaagagagtaggtcg

SEQ ID NO: 3507 - RNA, 21 nt, synthetic construct
  source 1..21: mol_type = other RNA
aatggccagggccaggcagat

SEQ ID NO: 3508 - RNA, 21 nt, synthetic construct
  source 1..21: mol_type = other RNA
aatggtaaggaggcctggggc

SEQ ID NO: 3509 - RNA, 21 nt, synthetic construct
  source 1..21: mol_type = other RNA
aatggtaagggggactgggac

SEQ ID NO: 3510 - RNA, 21 nt, synthetic construct
  source 1..21: mol_type = other RNA
aattcggaagtggggtggtcg

SEQ ID NO: 3511 - RNA, 21 nt, synthetic construct
  source 1..21: mol_type = other RNA
aattggagccgcttcaactgg

SEQ ID NO: 3512 - RNA, 21 nt, synthetic construct
  source 1..21: mol_type = other RNA
acaaagtccaggaccggctgg

SEQ ID NO: 3513 - RNA, 21 nt, synthetic construct
  source 1..21: mol_type = other RNA
acaaccccaaagtaccccgtc

SEQ ID NO: 3514 - RNA, 21 nt, synthetic construct
  source 1..21: mol_type = other RNA
acaagaaggggaggcgggacg

SEQ ID NO: 3515 - RNA, 21 nt, synthetic construct
  source 1..21: mol_type = other RNA
acaagctgcagacagaaagcg

SEQ ID NO: 3516 - RNA, 21 nt, synthetic construct
  source 1..21: mol_type = other RNA
acaatggccagggccaggcag

SEQ ID NO: 3517 - RNA, 21 nt, synthetic construct
  source 1..21: mol_type = other RNA
acacagcagagagcaagggga

SEQ ID NO: 3518 - RNA, 21 nt, synthetic construct
  source 1..21: mol_type = other RNA
acaccccgtcccagtccccct

SEQ ID NO: 3519 - RNA, 21 nt, synthetic construct
  source 1..21: mol_type = other RNA
acaccccgttctcctgtggat

SEQ ID NO: 3520 - RNA, 21 nt, synthetic construct
  source 1..21: mol_type = other RNA
acacggggaggatccgctcag

SEQ ID NO: 3521 - RNA, 21 nt, synthetic construct
  source 1..21: mol_type = other RNA
acagaaagcggcacaggccca

SEQ ID NO: 3522 - RNA, 21 nt, synthetic construct
  source 1..21: mol_type = other RNA
acagactagagaggtaagggg

SEQ ID NO: 3523 - RNA, 21 nt, synthetic construct
  source 1..21: mol_type = other RNA
acagagtggctaagcccaggg

SEQ ID NO: 3524 - RNA, 21 nt, synthetic construct
  source 1..21: mol_type = other RNA
acagcaagggcactcgggggc

SEQ ID NO: 3525 - RNA, 21 nt, synthetic construct
  source 1..21: mol_type = other RNA
acagcagagagcaaggggaag

SEQ ID NO: 3526 - RNA, 21 nt, synthetic construct
  source 1..21: mol_type = other RNA
acaggagaacggggtgtccag

SEQ ID NO: 3527 - RNA, 21 nt, synthetic construct
  source 1..21: mol_type = other RNA
acaggcccaggggagagaatg

SEQ ID NO: 3528 - RNA, 21 nt, synthetic construct
  source 1..21: mol_type = other RNA
acaggccccagaaggagaagg

SEQ ID NO: 3529 - RNA, 21 nt, synthetic construct
  source 1..21: mol_type = other RNA
acaggctgccaaagccagggc

SEQ ID NO: 3530 - RNA, 21 nt, synthetic construct
  source 1..21: mol_type = other RNA
acagtgggccagaggcggcgc

SEQ ID NO: 3531 - RNA, 21 nt, synthetic construct
  source 1..21: mol_type = other RNA
acatcacgtggtgcagcgccg

SEQ ID NO: 3532 - RNA, 21 nt, synthetic construct
  source 1..21: mol_type = other RNA
acatccgtcggagaaggccat

SEQ ID NO: 3533 - RNA, 21 nt, synthetic construct
  source 1..21: mol_type = other RNA
acatcggaagaggggaagtcg

SEQ ID NO: 3534 - RNA, 21 nt, synthetic construct
  source 1..21: mol_type = other RNA
accaccccacttccgaattgg

SEQ ID NO: 3535 - RNA, 21 nt, synthetic construct
  source 1..21: mol_type = other RNA
accacgtgatgtcctctgagc

SEQ ID NO: 3536 - RNA, 21 nt, synthetic construct
  source 1..21: mol_type = other RNA
accactctgccccaggcctcc

SEQ ID NO: 3537 - RNA, 21 nt, synthetic construct
  source 1..21: mol_type = other RNA
accactttgagctctactggc

SEQ ID NO: 3538 - RNA, 21 nt, synthetic construct
  source 1..21: mol_type = other RNA
accagactgagctatgggagc

SEQ ID NO: 3539 - RNA, 21 nt, synthetic construct
  source 1..21: mol_type = other RNA
accatccctccctcgacttcc

SEQ ID NO: 3540 - RNA, 21 nt, synthetic construct
  source 1..21: mol_type = other RNA
accattccccttcgaccaccc

SEQ ID NO: 3541 - RNA, 21 nt, synthetic construct
  source 1..21: mol_type = other RNA
accattccccttcgacctact

SEQ ID NO: 3542 - RNA, 21 nt, synthetic construct
  source 1..21: mol_type = other RNA
acccaaccccatgccgtcttc

SEQ ID NO: 3543 - RNA, 21 nt, synthetic construct
  source 1..21: mol_type = other RNA
acccagacacggggaggatcc

SEQ ID NO: 3544 - RNA, 21 nt, synthetic construct
  source 1..21: mol_type = other RNA
acccagcgagtgaagacggca

SEQ ID NO: 3545 - RNA, 21 nt, synthetic construct
  source 1..21: mol_type = other RNA
acccaggccacaagctgcaga

SEQ ID NO: 3546 - RNA, 21 nt, synthetic construct
  source 1..21: mol_type = other RNA
acccatgcagtcctccttacc

SEQ ID NO: 3547 - RNA, 21 nt, synthetic construct
  source 1..21: mol_type = other RNA
accccaaagtaccccgtctcc

SEQ ID NO: 3548 - RNA, 21 nt, synthetic construct
  source 1..21: mol_type = other RNA
accccacttccgaattggagc

SEQ ID NO: 3549 - RNA, 21 nt, synthetic construct
  source 1..21: mol_type = other RNA
accccatgccgtcttcactcg

SEQ ID NO: 3550 - RNA, 21 nt, synthetic construct
  source 1..21: mol_type = other RNA
accccccttacctctctagtc

SEQ ID NO: 3551 - RNA, 21 nt, synthetic construct
  source 1..21: mol_type = other RNA
accccgtcccagtccccctta

SEQ ID NO: 3552 - RNA, 21 nt, synthetic construct
  source 1..21: mol_type = other RNA
accccgtctccctggctttag

SEQ ID NO: 3553 - RNA, 21 nt, synthetic construct
  source 1..21: mol_type = other RNA
accccgttctcctgtggattc

SEQ ID NO: 3554 - RNA, 21 nt, synthetic construct
  source 1..21: mol_type = other RNA
acccgaatccacaggagaacg

SEQ ID NO: 3555 - RNA, 21 nt, synthetic construct
  source 1..21: mol_type = other RNA
accctatgctgacaccccgtc

SEQ ID NO: 3556 - RNA, 21 nt, synthetic construct
  source 1..21: mol_type = other RNA
accggctggaggggctcaaca

SEQ ID NO: 3557 - RNA, 21 nt, synthetic construct
  source 1..21: mol_type = other RNA
accgtttttctggacaacccc

SEQ ID NO: 3558 - RNA, 21 nt, synthetic construct
  source 1..21: mol_type = other RNA
acctactctcttccgcattgg

SEQ ID NO: 3559 - RNA, 21 nt, synthetic construct
  source 1..21: mol_type = other RNA
acctctacggctggcccagat

SEQ ID NO: 3560 - RNA, 21 nt, synthetic construct
  source 1..21: mol_type = other RNA
acctctcactcctttcatttg

SEQ ID NO: 3561 - RNA, 21 nt, synthetic construct
  source 1..21: mol_type = other RNA
acctctccatcctcttgcttt

SEQ ID NO: 3562 - RNA, 21 nt, synthetic construct
  source 1..21: mol_type = other RNA
acctgaaggaggcggcaggga

SEQ ID NO: 3563 - RNA, 21 nt, synthetic construct
  source 1..21: mol_type = other RNA
acctgagccagctcccatagc

SEQ ID NO: 3564 - RNA, 21 nt, synthetic construct
  source 1..21: mol_type = other RNA
acctgcattctctcccctggg

SEQ ID NO: 3565 - RNA, 21 nt, synthetic construct
  source 1..21: mol_type = other RNA
acctgcctgggaaggggaaac

SEQ ID NO: 3566 - RNA, 21 nt, synthetic construct
  source 1..21: mol_type = other RNA
acgagagatggcacaggcccc

SEQ ID NO: 3567 - RNA, 21 nt, synthetic construct
  source 1..21: mol_type = other RNA
acgcaagggagacatccgtcg

SEQ ID NO: 3568 - RNA, 21 nt, synthetic construct
  source 1..21: mol_type = other RNA
acgctgccgtctctctcctga

SEQ ID NO: 3569 - RNA, 21 nt, synthetic construct
  source 1..21: mol_type = other RNA
acggaacctgaaggaggcggc

SEQ ID NO: 3570 - RNA, 21 nt, synthetic construct
  source 1..21: mol_type = other RNA
acggatgtctcccttgcgtcc

SEQ ID NO: 3571 - RNA, 21 nt, synthetic construct
  source 1..21: mol_type = other RNA
acggcagcgttagagggcaga

SEQ ID NO: 3572 - RNA, 21 nt, synthetic construct
  source 1..21: mol_type = other RNA
acggcatggggttgggtgagg

SEQ ID NO: 3573 - RNA, 21 nt, synthetic construct
  source 1..21: mol_type = other RNA
acggctggcccagatccttcc

SEQ ID NO: 3574 - RNA, 21 nt, synthetic construct
  source 1..21: mol_type = other RNA
acggggaggatccgctcagag

SEQ ID NO: 3575 - RNA, 21 nt, synthetic construct
  source 1..21: mol_type = other RNA
acggggtactttggggttgtc

SEQ ID NO: 3576 - RNA, 21 nt, synthetic construct
  source 1..21: mol_type = other RNA
acggggtgtcagcatagggtg

SEQ ID NO: 3577 - RNA, 21 nt, synthetic construct
  source 1..21: mol_type = other RNA
acggggtgtccaggcaaagaa

SEQ ID NO: 3578 - RNA, 21 nt, synthetic construct
  source 1..21: mol_type = other RNA
acggtgatgatgcaggcctac

SEQ ID NO: 3579 - RNA, 21 nt, synthetic construct
  source 1..21: mol_type = other RNA
acgtgatgtcctctgagcgga

SEQ ID NO: 3580 - RNA, 21 nt, synthetic construct
  source 1..21: mol_type = other RNA
acgtggtgcagcgccgagaag

SEQ ID NO: 3581 - RNA, 21 nt, synthetic construct
  source 1..21: mol_type = other RNA
actagagaggtaaggggggta

SEQ ID NO: 3582 - RNA, 21 nt, synthetic construct
  source 1..21: mol_type = other RNA
actcaggagagagacggcagc

SEQ ID NO: 3583 - RNA, 21 nt, synthetic construct
  source 1..21: mol_type = other RNA
actccaatgcggaagagagta

SEQ ID NO: 3584 - RNA, 21 nt, synthetic construct
  source 1..21: mol_type = other RNA
actccctcttccccttgctct

SEQ ID NO: 3585 - RNA, 21 nt, synthetic construct
  source 1..21: mol_type = other RNA
actcctttcatttgggcagct

SEQ ID NO: 3586 - RNA, 21 nt, synthetic construct
  source 1..21: mol_type = other RNA
actcgctgggttcccttttcc

SEQ ID NO: 3587 - RNA, 21 nt, synthetic construct
  source 1..21: mol_type = other RNA
actcgggggcgagaggagggc

SEQ ID NO: 3588 - RNA, 21 nt, synthetic construct
  source 1..21: mol_type = other RNA
actctcttccgcattggagtc

SEQ ID NO: 3589 - RNA, 21 nt, synthetic construct
  source 1..21: mol_type = other RNA
actctgccccaggcctcctta

SEQ ID NO: 3590 - RNA, 21 nt, synthetic construct
  source 1..21: mol_type = other RNA
actctgccctctaacgctgcc

SEQ ID NO: 3591 - RNA, 21 nt, synthetic construct
  source 1..21: mol_type = other RNA
actctgtgctgaccactctgc

SEQ ID NO: 3592 - RNA, 21 nt, synthetic construct
  source 1..21: mol_type = other RNA
actgagctatgggagctggct

SEQ ID NO: 3593 - RNA, 21 nt, synthetic construct
  source 1..21: mol_type = other RNA
actgcatgggtcagcacaggc

SEQ ID NO: 3594 - RNA, 21 nt, synthetic construct
  source 1..21: mol_type = other RNA
actggccctggctttggcagc

SEQ ID NO: 3595 - RNA, 21 nt, synthetic construct
  source 1..21: mol_type = other RNA
actggccctgggcttagccac

SEQ ID NO: 3596 - RNA, 21 nt, synthetic construct
  source 1..21: mol_type = other RNA
actggcttctgcgccgcctct

SEQ ID NO: 3597 - RNA, 21 nt, synthetic construct
  source 1..21: mol_type = other RNA
actgggacggggtgtcagcat

SEQ ID NO: 3598 - RNA, 21 nt, synthetic construct
  source 1..21: mol_type = other RNA
actgtttccccttcccaggca

SEQ ID NO: 3599 - RNA, 21 nt, synthetic construct
  source 1..21: mol_type = other RNA
acttcccctcttccgatgttg

SEQ ID NO: 3600 - RNA, 21 nt, synthetic construct
  source 1..21: mol_type = other RNA
acttccgaattggagccgctt

SEQ ID NO: 3601 - RNA, 21 nt, synthetic construct
  source 1..21: mol_type = other RNA
acttccttctcggcgctgcac

SEQ ID NO: 3602 - RNA, 21 nt, synthetic construct
  source 1..21: mol_type = other RNA
actttgagctctactggcttc

SEQ ID NO: 3603 - RNA, 21 nt, synthetic construct
  source 1..21: mol_type = other RNA
actttgcgctgccctcctctc

SEQ ID NO: 3604 - RNA, 21 nt, synthetic construct
  source 1..21: mol_type = other RNA
actttggggttgtccagaaaa

SEQ ID NO: 3605 - RNA, 21 nt, synthetic construct
  source 1..21: mol_type = other RNA
actttgtctccttccctgccc

SEQ ID NO: 3606 - RNA, 21 nt, synthetic construct
  source 1..21: mol_type = other RNA
agaaaaacggtgatgatgcag

SEQ ID NO: 3607 - RNA, 21 nt, synthetic construct
  source 1..21: mol_type = other RNA
agaaacgagagatggcacagg

SEQ ID NO: 3608 - RNA, 21 nt, synthetic construct
  source 1..21: mol_type = other RNA
agaaagcaagaggatggagag

SEQ ID NO: 3609 - RNA, 21 nt, synthetic construct
  source 1..21: mol_type = other RNA
agaaagcaggacctgcctggg

SEQ ID NO: 3610 - RNA, 21 nt, synthetic construct
  source 1..21: mol_type = other RNA
agaaagcggcacaggcccagg

SEQ ID NO: 3611 - RNA, 21 nt, synthetic construct
  source 1..21: mol_type = other RNA
agaacggggtgtccaggcaaa

SEQ ID NO: 3612 - RNA, 21 nt, synthetic construct
  source 1..21: mol_type = other RNA
agaagccagtagagctcaaag

SEQ ID NO: 3613 - RNA, 21 nt, synthetic construct
  source 1..21: mol_type = other RNA
agaaggaaaagggaacccagc

SEQ ID NO: 3614 - RNA, 21 nt, synthetic construct
  source 1..21: mol_type = other RNA
agaaggaagtgctccggaaag

SEQ ID NO: 3615 - RNA, 21 nt, synthetic construct
  source 1..21: mol_type = other RNA
agaaggagaaggaaaagggaa

SEQ ID NO: 3616 - RNA, 21 nt, synthetic construct
  source 1..21: mol_type = other RNA
agaaggccatcctaagaaacg

SEQ ID NO: 3617 - RNA, 21 nt, synthetic construct
  source 1..21: mol_type = other RNA
agaaggggaggcgggacgcaa

SEQ ID NO: 3618 - RNA, 21 nt, synthetic construct
  source 1..21: mol_type = other RNA
agaatgcaggtcagagaaagc

SEQ ID NO: 3619 - RNA, 21 nt, synthetic construct
  source 1..21: mol_type = other RNA
agacaaagtccaggaccggct

SEQ ID NO: 3620 - RNA, 21 nt, synthetic construct
  source 1..21: mol_type = other RNA
agacacggggaggatccgctc

SEQ ID NO: 3621 - RNA, 21 nt, synthetic construct
  source 1..21: mol_type = other RNA
agacagaaagcggcacaggcc

SEQ ID NO: 3622 - RNA, 21 nt, synthetic construct
  source 1..21: mol_type = other RNA
agacatccgtcggagaaggcc

SEQ ID NO: 3623 - RNA, 21 nt, synthetic construct
  source 1..21: mol_type = other RNA
agaccagactgagctatggga

SEQ ID NO: 3624 - RNA, 21 nt, synthetic construct
  source 1..21: mol_type = other RNA
agacggaacctgaaggaggcg

SEQ ID NO: 3625 - RNA, 21 nt, synthetic construct
  source 1..21: mol_type = other RNA
agacggcagcgttagagggca

SEQ ID NO: 3626 - RNA, 21 nt, synthetic construct
  source 1..21: mol_type = other RNA
agacggcatggggttgggtga

SEQ ID NO: 3627 - RNA, 21 nt, synthetic construct
  source 1..21: mol_type = other RNA
agacggggtactttggggttg

SEQ ID NO: 3628 - RNA, 21 nt, synthetic construct
  source 1..21: mol_type = other RNA
agactagagaggtaagggggg

SEQ ID NO: 3629 - RNA, 21 nt, synthetic construct
  source 1..21: mol_type = other RNA
agactgagctatgggagctgg

SEQ ID NO: 3630 - RNA, 21 nt, synthetic construct
  source 1..21: mol_type = other RNA
agagaaagcaggacctgcctg

SEQ ID NO: 3631 - RNA, 21 nt, synthetic construct
  source 1..21: mol_type = other RNA
agagaatgcaggtcagagaaa

SEQ ID NO: 3632 - RNA, 21 nt, synthetic construct
  source 1..21: mol_type = other RNA
agagacggcagcgttagaggg

SEQ ID NO: 3633 - RNA, 21 nt, synthetic construct
  source 1..21: mol_type = other RNA
agagagacggcagcgttagag

SEQ ID NO: 3634 - RNA, 21 nt, synthetic construct
  source 1..21: mol_type = other RNA
agagagcaaggggaagaggga

SEQ ID NO: 3635 - RNA, 21 nt, synthetic construct
  source 1..21: mol_type = other RNA
agagaggtaaggggggtaggg

SEQ ID NO: 3636 - RNA, 21 nt, synthetic construct
  source 1..21: mol_type = other RNA
agagagtaggtcgaaggggaa

SEQ ID NO: 3637 - RNA, 21 nt, synthetic construct
  source 1..21: mol_type = other RNA
agagatgcccggagaggaccc

SEQ ID NO: 3638 - RNA, 21 nt, synthetic construct
  source 1..21: mol_type = other RNA
agagatggcacaggccccaga

SEQ ID NO: 3639 - RNA, 21 nt, synthetic construct
  source 1..21: mol_type = other RNA
agagcaaggggaagagggagt

SEQ ID NO: 3640 - RNA, 21 nt, synthetic construct
  source 1..21: mol_type = other RNA
agagcatccttgggcagcaac

SEQ ID NO: 3641 - RNA, 21 nt, synthetic construct
  source 1..21: mol_type = other RNA
agagctcaaagtggtccggac

SEQ ID NO: 3642 - RNA, 21 nt, synthetic construct
  source 1..21: mol_type = other RNA
agaggacatcacgtggtgcag

SEQ ID NO: 3643 - RNA, 21 nt, synthetic construct
  source 1..21: mol_type = other RNA
agaggacccagacacggggag

SEQ ID NO: 3644 - RNA, 21 nt, synthetic construct
  source 1..21: mol_type = other RNA
agaggagggcagcgcaaagtg

SEQ ID NO: 3645 - RNA, 21 nt, synthetic construct
  source 1..21: mol_type = other RNA
agaggatggagaggtggctaa

SEQ ID NO: 3646 - RNA, 21 nt, synthetic construct
  source 1..21: mol_type = other RNA
agaggcggcgcagaagccagt

SEQ ID NO: 3647 - RNA, 21 nt, synthetic construct
  source 1..21: mol_type = other RNA
agagggagtggaggaagacgg

SEQ ID NO: 3648 - RNA, 21 nt, synthetic construct
  source 1..21: mol_type = other RNA
agagggcagagttccggcggc

SEQ ID NO: 3649 - RNA, 21 nt, synthetic construct
  source 1..21: mol_type = other RNA
agagggcagggcagggaagga

SEQ ID NO: 3650 - RNA, 21 nt, synthetic construct
  source 1..21: mol_type = other RNA
agaggggaagtcgagggaggg

SEQ ID NO: 3651 - RNA, 21 nt, synthetic construct
  source 1..21: mol_type = other RNA
agaggtaaggggggtagggga

SEQ ID NO: 3652 - RNA, 21 nt, synthetic construct
  source 1..21: mol_type = other RNA
agaggtgacccaggccacaag

SEQ ID NO: 3653 - RNA, 21 nt, synthetic construct
  source 1..21: mol_type = other RNA
agaggtgacccgaatccacag

SEQ ID NO: 3654 - RNA, 21 nt, synthetic construct
  source 1..21: mol_type = other RNA
agaggtggctaaagccaggga

SEQ ID NO: 3655 - RNA, 21 nt, synthetic construct
  source 1..21: mol_type = other RNA
agagtaggtcgaaggggaatg

SEQ ID NO: 3656 - RNA, 21 nt, synthetic construct
  source 1..21: mol_type = other RNA
agagtggctaagcccagggcc

SEQ ID NO: 3657 - RNA, 21 nt, synthetic construct
  source 1..21: mol_type = other RNA
agagtggtcagcacagagtgg

SEQ ID NO: 3658 - RNA, 21 nt, synthetic construct
  source 1..21: mol_type = other RNA
agagttccggcggcacagcaa

SEQ ID NO: 3659 - RNA, 21 nt, synthetic construct
  source 1..21: mol_type = other RNA
agatagaccagactgagctat

SEQ ID NO: 3660 - RNA, 21 nt, synthetic construct
  source 1..21: mol_type = other RNA
agatccttccctgccgcctcc

SEQ ID NO: 3661 - RNA, 21 nt, synthetic construct
  source 1..21: mol_type = other RNA
agatgcccggagaggacccag

SEQ ID NO: 3662 - RNA, 21 nt, synthetic construct
  source 1..21: mol_type = other RNA
agatggcacaggccccagaag

SEQ ID NO: 3663 - RNA, 21 nt, synthetic construct
  source 1..21: mol_type = other RNA
agcaacacagcagagagcaag

SEQ ID NO: 3664 - RNA, 21 nt, synthetic construct
  source 1..21: mol_type = other RNA
agcaagaggatggagaggtgg

SEQ ID NO: 3665 - RNA, 21 nt, synthetic construct
  source 1..21: mol_type = other RNA
agcaagggcactcgggggcga

SEQ ID NO: 3666 - RNA, 21 nt, synthetic construct
  source 1..21: mol_type = other RNA
agcaaggggaagagggagtgg

SEQ ID NO: 3667 - RNA, 21 nt, synthetic construct
  source 1..21: mol_type = other RNA
agcacagactagagaggtaag

SEQ ID NO: 3668 - RNA, 21 nt, synthetic construct
  source 1..21: mol_type = other RNA
agcacagagtggctaagccca

SEQ ID NO: 3669 - RNA, 21 nt, synthetic construct
  source 1..21: mol_type = other RNA
agcacaggctgccaaagccag

SEQ ID NO: 3670 - RNA, 21 nt, synthetic construct
  source 1..21: mol_type = other RNA
agcacttccttctcggcgctg

SEQ ID NO: 3671 - RNA, 21 nt, synthetic construct
  source 1..21: mol_type = other RNA
agcagagagcaaggggaagag

SEQ ID NO: 3672 - RNA, 21 nt, synthetic construct
  source 1..21: mol_type = other RNA
agcaggacctgcctgggaagg

SEQ ID NO: 3673 - RNA, 21 nt, synthetic construct
  source 1..21: mol_type = other RNA
agcatagggtggcaaagccca

SEQ ID NO: 3674 - RNA, 21 nt, synthetic construct
  source 1..21: mol_type = other RNA
agcatccttgggcagcaacac

SEQ ID NO: 3675 - RNA, 21 nt, synthetic construct
  source 1..21: mol_type = other RNA
agccacctctccatcctcttg

SEQ ID NO: 3676 - RNA, 21 nt, synthetic construct
  source 1..21: mol_type = other RNA
agccactctgtgctgaccact

SEQ ID NO: 3677 - RNA, 21 nt, synthetic construct
  source 1..21: mol_type = other RNA
agccagctcccatagctcagt

SEQ ID NO: 3678 - RNA, 21 nt, synthetic construct
  source 1..21: mol_type = other RNA
agccagggagacggggtactt

SEQ ID NO: 3679 - RNA, 21 nt, synthetic construct
  source 1..21: mol_type = other RNA
agccagggccagttaaagcga

SEQ ID NO: 3680 - RNA, 21 nt, synthetic construct
  source 1..21: mol_type = other RNA
agccagtagagctcaaagtgg

SEQ ID NO: 3681 - RNA, 21 nt, synthetic construct
  source 1..21: mol_type = other RNA
agcccagggccagttgaagcg

SEQ ID NO: 3682 - RNA, 21 nt, synthetic construct
  source 1..21: mol_type = other RNA
agcccctccagccggtcctgg

SEQ ID NO: 3683 - RNA, 21 nt, synthetic construct
  source 1..21: mol_type = other RNA
agccgcttcaactggccctgg

SEQ ID NO: 3684 - RNA, 21 nt, synthetic construct
  source 1..21: mol_type = other RNA
agccggtcctggactttgtct

SEQ ID NO: 3685 - RNA, 21 nt, synthetic construct
  source 1..21: mol_type = other RNA
agccgtagaggtgacccaggc

SEQ ID NO: 3686 - RNA, 21 nt, synthetic construct
  source 1..21: mol_type = other RNA
agcctgtgctgacccatgcag

SEQ ID NO: 3687 - RNA, 21 nt, synthetic construct
  source 1..21: mol_type = other RNA
agcgactccaatgcggaagag

SEQ ID NO: 3688 - RNA, 21 nt, synthetic construct
  source 1..21: mol_type = other RNA
agcgagtgaagacggcatggg

SEQ ID NO: 3689 - RNA, 21 nt, synthetic construct
  source 1..21: mol_type = other RNA
agcgcaaagtgacaatggcca

SEQ ID NO: 3690 - RNA, 21 nt, synthetic construct
  source 1..21: mol_type = other RNA
agcgccgagaaggaagtgctc

SEQ ID NO: 3691 - RNA, 21 nt, synthetic construct
  source 1..21: mol_type = other RNA
agcggatcctccccgtgtctg

SEQ ID NO: 3692 - RNA, 21 nt, synthetic construct
  source 1..21: mol_type = other RNA
agcggcacaggcccaggggag

SEQ ID NO: 3693 - RNA, 21 nt, synthetic construct
  source 1..21: mol_type = other RNA
agcggctccaattcggaagtg

SEQ ID NO: 3694 - RNA, 21 nt, synthetic construct
  source 1..21: mol_type = other RNA
agcgttagagggcagagttcc

SEQ ID NO: 3695 - RNA, 21 nt, synthetic construct
  source 1..21: mol_type = other RNA
agctagcacagactagagagg

SEQ ID NO: 3696 - RNA, 21 nt, synthetic construct
  source 1..21: mol_type = other RNA
agctatgggagctggctcagg

SEQ ID NO: 3697 - RNA, 21 nt, synthetic construct
  source 1..21: mol_type = other RNA
agctcaaagtggtccggactc

SEQ ID NO: 3698 - RNA, 21 nt, synthetic construct
  source 1..21: mol_type = other RNA
agctcagtctggtctatctgc

SEQ ID NO: 3699 - RNA, 21 nt, synthetic construct
  source 1..21: mol_type = other RNA
agctcccatagctcagtctgg

SEQ ID NO: 3700 - RNA, 21 nt, synthetic construct
  source 1..21: mol_type = other RNA
agctcccctaccccccttacc

SEQ ID NO: 3701 - RNA, 21 nt, synthetic construct
  source 1..21: mol_type = other RNA
agctctactggcttctgcgcc

SEQ ID NO: 3702 - RNA, 21 nt, synthetic construct
  source 1..21: mol_type = other RNA
agctgcagacagaaagcggca

SEQ ID NO: 3703 - RNA, 21 nt, synthetic construct
  source 1..21: mol_type = other RNA
agctgcccaaatgaaaggagt

SEQ ID NO: 3704 - RNA, 21 nt, synthetic construct
  source 1..21: mol_type = other RNA
agctggctcaggttcaggaga

SEQ ID NO: 3705 - RNA, 21 nt, synthetic construct
  source 1..21: mol_type = other RNA
agcttgtggcctgggtcacct

SEQ ID NO: 3706 - RNA, 21 nt, synthetic construct
  source 1..21: mol_type = other RNA
aggaaaagggaacccagcgag

SEQ ID NO: 3707 - RNA, 21 nt, synthetic construct
  source 1..21: mol_type = other RNA
aggaagacggaacctgaagga

SEQ ID NO: 3708 - RNA, 21 nt, synthetic construct
  source 1..21: mol_type = other RNA
aggaagtgctccggaaagagc

SEQ ID NO: 3709 - RNA, 21 nt, synthetic construct
  source 1..21: mol_type = other RNA
aggacatcacgtggtgcagcg

SEQ ID NO: 3710 - RNA, 21 nt, synthetic construct
  source 1..21: mol_type = other RNA
aggacccagacacggggagga

SEQ ID NO: 3711 - RNA, 21 nt, synthetic construct
  source 1..21: mol_type = other RNA
aggaccggctggaggggctca

SEQ ID NO: 3712 - RNA, 21 nt, synthetic construct
  source 1..21: mol_type = other RNA
aggacctgcctgggaagggga

SEQ ID NO: 3713 - RNA, 21 nt, synthetic construct
  source 1..21: mol_type = other RNA
aggactgcatgggtcagcaca

SEQ ID NO: 3714 - RNA, 21 nt, synthetic construct
  source 1..21: mol_type = other RNA
aggagaacggggtgtccaggc

SEQ ID NO: 3715 - RNA, 21 nt, synthetic construct
  source 1..21: mol_type = other RNA
aggagaaggaaaagggaaccc

SEQ ID NO: 3716 - RNA, 21 nt, synthetic construct
  source 1..21: mol_type = other RNA
aggagacaaagtccaggaccg

SEQ ID NO: 3717 - RNA, 21 nt, synthetic construct
  source 1..21: mol_type = other RNA
aggagagagacggcagcgtta

SEQ ID NO: 3718 - RNA, 21 nt, synthetic construct
  source 1..21: mol_type = other RNA
aggagagatgcccggagagga

SEQ ID NO: 3719 - RNA, 21 nt, synthetic construct
  source 1..21: mol_type = other RNA
aggagagggcagggcagggaa

SEQ ID NO: 3720 - RNA, 21 nt, synthetic construct
  source 1..21: mol_type = other RNA
aggaggactgcatgggtcagc

SEQ ID NO: 3721 - RNA, 21 nt, synthetic construct
  source 1..21: mol_type = other RNA
aggaggcctggggcagagtgg

SEQ ID NO: 3722 - RNA, 21 nt, synthetic construct
  source 1..21: mol_type = other RNA
aggaggcggcagggaaggatc

SEQ ID NO: 3723 - RNA, 21 nt, synthetic construct
  source 1..21: mol_type = other RNA
aggagggcagcgcaaagtgac

SEQ ID NO: 3724 - RNA, 21 nt, synthetic construct
  source 1..21: mol_type = other RNA
aggagtgagaggtgacccgaa

SEQ ID NO: 3725 - RNA, 21 nt, synthetic construct
  source 1..21: mol_type = other RNA
aggatccgctcagaggacatc

SEQ ID NO: 3726 - RNA, 21 nt, synthetic construct
  source 1..21: mol_type = other RNA
aggatctgggccagccgtaga

SEQ ID NO: 3727 - RNA, 21 nt, synthetic construct
  source 1..21: mol_type = other RNA
aggatgctctttccggagcac

SEQ ID NO: 3728 - RNA, 21 nt, synthetic construct
  source 1..21: mol_type = other RNA
aggatggagaggtggctaaag

SEQ ID NO: 3729 - RNA, 21 nt, synthetic construct
  source 1..21: mol_type = other RNA
aggatggccttctccgacgga

SEQ ID NO: 3730 - RNA, 21 nt, synthetic construct
  source 1..21: mol_type = other RNA
aggcaaagaaagcaagaggat

SEQ ID NO: 3731 - RNA, 21 nt, synthetic construct
  source 1..21: mol_type = other RNA
aggcagatagaccagactgag

SEQ ID NO: 3732 - RNA, 21 nt, synthetic construct
  source 1..21: mol_type = other RNA
aggcaggtcctgctttctctg

SEQ ID NO: 3733 - RNA, 21 nt, synthetic construct
  source 1..21: mol_type = other RNA
aggccacaagctgcagacaga

SEQ ID NO: 3734 - RNA, 21 nt, synthetic construct
  source 1..21: mol_type = other RNA
aggccatcctaagaaacgaga

SEQ ID NO: 3735 - RNA, 21 nt, synthetic construct
  source 1..21: mol_type = other RNA
aggcccaggggagagaatgca

SEQ ID NO: 3736 - RNA, 21 nt, synthetic construct
  source 1..21: mol_type = other RNA
aggccccagaaggagaaggaa

SEQ ID NO: 3737 - RNA, 21 nt, synthetic construct
  source 1..21: mol_type = other RNA
aggcctacaagaaggggaggc

SEQ ID NO: 3738 - RNA, 21 nt, synthetic construct
  source 1..21: mol_type = other RNA
aggcctccttaccattcccct

SEQ ID NO: 3739 - RNA, 21 nt, synthetic construct
  source 1..21: mol_type = other RNA
aggcctgcatcatcaccgttt

SEQ ID NO: 3740 - RNA, 21 nt, synthetic construct
  source 1..21: mol_type = other RNA
aggcctggggcagagtggtca

SEQ ID NO: 3741 - RNA, 21 nt, synthetic construct
  source 1..21: mol_type = other RNA
aggcggcagggaaggatctgg

SEQ ID NO: 3742 - RNA, 21 nt, synthetic construct
  source 1..21: mol_type = other RNA
aggcggcgcagaagccagtag

SEQ ID NO: 3743 - RNA, 21 nt, synthetic construct
  source 1..21: mol_type = other RNA
aggcgggacgcaagggagaca

SEQ ID NO: 3744 - RNA, 21 nt, synthetic construct
  source 1..21: mol_type = other RNA
aggctgccaaagccagggcca

SEQ ID NO: 3745 - RNA, 21 nt, synthetic construct
  source 1..21: mol_type = other RNA
agggaacccagcgagtgaaga

SEQ ID NO: 3746 - RNA, 21 nt, synthetic construct
  source 1..21: mol_type = other RNA
agggaaggagacaaagtccag

SEQ ID NO: 3747 - RNA, 21 nt, synthetic construct
  source 1..21: mol_type = other RNA
agggaaggatctgggccagcc

SEQ ID NO: 3748 - RNA, 21 nt, synthetic construct
  source 1..21: mol_type = other RNA
agggagacatccgtcggagaa

SEQ ID NO: 3749 - RNA, 21 nt, synthetic construct
  source 1..21: mol_type = other RNA
agggagacggggtactttggg

SEQ ID NO: 3750 - RNA, 21 nt, synthetic construct
  source 1..21: mol_type = other RNA
agggaggagagatgcccggag

SEQ ID NO: 3751 - RNA, 21 nt, synthetic construct
  source 1..21: mol_type = other RNA
agggagggatggtaaggagga

SEQ ID NO: 3752 - RNA, 21 nt, synthetic construct
  source 1..21: mol_type = other RNA
agggagtggaggaagacggaa

SEQ ID NO: 3753 - RNA, 21 nt, synthetic construct
  source 1..21: mol_type = other RNA
agggatggtaaggaggactgc

SEQ ID NO: 3754 - RNA, 21 nt, synthetic construct
  source 1..21: mol_type = other RNA
agggcactcgggggcgagagg

SEQ ID NO: 3755 - RNA, 21 nt, synthetic construct
  source 1..21: mol_type = other RNA
agggcagagttccggcggcac

SEQ ID NO: 3756 - RNA, 21 nt, synthetic construct
  source 1..21: mol_type = other RNA
agggcagcgcaaagtgacaat

SEQ ID NO: 3757 - RNA, 21 nt, synthetic construct
  source 1..21: mol_type = other RNA
agggcagggaaggagacaaag

SEQ ID NO: 3758 - RNA, 21 nt, synthetic construct
  source 1..21: mol_type = other RNA
agggcagggcagggaaggaga

SEQ ID NO: 3759 - RNA, 21 nt, synthetic construct
  source 1..21: mol_type = other RNA
agggccaggcagatagaccag

SEQ ID NO: 3760 - RNA, 21 nt, synthetic construct
  source 1..21: mol_type = other RNA
agggccagttaaagcgactcc

SEQ ID NO: 3761 - RNA, 21 nt, synthetic construct
  source 1..21: mol_type = other RNA
agggccagttgaagcggctcc

SEQ ID NO: 3762 - RNA, 21 nt, synthetic construct
  source 1..21: mol_type = other RNA
aggggaaacagtgggccagag

SEQ ID NO: 3763 - RNA, 21 nt, synthetic construct
  source 1..21: mol_type = other RNA
aggggaagagggagtggagga

SEQ ID NO: 3764 - RNA, 21 nt, synthetic construct
  source 1..21: mol_type = other RNA
aggggaagtcgagggagggat

SEQ ID NO: 3765 - RNA, 21 nt, synthetic construct
  source 1..21: mol_type = other RNA
aggggaatggtaaggaggcct

SEQ ID NO: 3766 - RNA, 21 nt, synthetic construct
  source 1..21: mol_type = other RNA
aggggaatggtaagggggact

SEQ ID NO: 3767 - RNA, 21 nt, synthetic construct
  source 1..21: mol_type = other RNA
aggggagagaatgcaggtcag

SEQ ID NO: 3768 - RNA, 21 nt, synthetic construct
  source 1..21: mol_type = other RNA
aggggagctgcccaaatgaaa

SEQ ID NO: 3769 - RNA, 21 nt, synthetic construct
  source 1..21: mol_type = other RNA
aggggaggcgggacgcaaggg

SEQ ID NO: 3770 - RNA, 21 nt, synthetic construct
  source 1..21: mol_type = other RNA
aggggctcaacatcggaagag

SEQ ID NO: 3771 - RNA, 21 nt, synthetic construct
  source 1..21: mol_type = other RNA
agggggactgggacggggtgt

SEQ ID NO: 3772 - RNA, 21 nt, synthetic construct
  source 1..21: mol_type = other RNA
aggggggtaggggagctgccc

SEQ ID NO: 3773 - RNA, 21 nt, synthetic construct
  source 1..21: mol_type = other RNA
agggtggcaaagcccagggcc

SEQ ID NO: 3774 - RNA, 21 nt, synthetic construct
  source 1..21: mol_type = other RNA
aggtaaggggggtaggggagc

SEQ ID NO: 3775 - RNA, 21 nt, synthetic construct
  source 1..21: mol_type = other RNA
aggtcagagaaagcaggacct

SEQ ID NO: 3776 - RNA, 21 nt, synthetic construct
  source 1..21: mol_type = other RNA
aggtcctgctttctctgacct

SEQ ID NO: 3777 - RNA, 21 nt, synthetic construct
  source 1..21: mol_type = other RNA
aggtcgaaggggaatggtaag

SEQ ID NO: 3778 - RNA, 21 nt, synthetic construct
  source 1..21: mol_type = other RNA
aggtgacccaggccacaagct

SEQ ID NO: 3779 - RNA, 21 nt, synthetic construct
  source 1..21: mol_type = other RNA
aggtgacccgaatccacagga

SEQ ID NO: 3780 - RNA, 21 nt, synthetic construct
  source 1..21: mol_type = other RNA
aggtggctaaagccagggaga

SEQ ID NO: 3781 - RNA, 21 nt, synthetic construct
  source 1..21: mol_type = other RNA
aggttcaggagagggcagggc

SEQ ID NO: 3782 - RNA, 21 nt, synthetic construct
  source 1..21: mol_type = other RNA
aggttccgtcttcctccactc

SEQ ID NO: 3783 - RNA, 21 nt, synthetic construct
  source 1..21: mol_type = other RNA
agtaccccgtctccctggctt

SEQ ID NO: 3784 - RNA, 21 nt, synthetic construct
  source 1..21: mol_type = other RNA
agtagagctcaaagtggtccg

SEQ ID NO: 3785 - RNA, 21 nt, synthetic construct
  source 1..21: mol_type = other RNA
agtaggtcgaaggggaatggt

SEQ ID NO: 3786 - RNA, 21 nt, synthetic construct
  source 1..21: mol_type = other RNA
agtccaggaccggctggaggg

SEQ ID NO: 3787 - RNA, 21 nt, synthetic construct
  source 1..21: mol_type = other RNA
agtcccccttaccattcccct

SEQ ID NO: 3788 - RNA, 21 nt, synthetic construct
  source 1..21: mol_type = other RNA
agtccggaccactttgagctc

SEQ ID NO: 3789 - RNA, 21 nt, synthetic construct
  source 1..21: mol_type = other RNA
agtcctccttaccatccctcc

SEQ ID NO: 3790 - RNA, 21 nt, synthetic construct
  source 1..21: mol_type = other RNA
agtcgagggagggatggtaag

SEQ ID NO: 3791 - RNA, 21 nt, synthetic construct
  source 1..21: mol_type = other RNA
agtcgctttaactggccctgg

SEQ ID NO: 3792 - RNA, 21 nt, synthetic construct
  source 1..21: mol_type = other RNA
agtctggtctatctgcctggc

SEQ ID NO: 3793 - RNA, 21 nt, synthetic construct
  source 1..21: mol_type = other RNA
agtgaagacggcatggggttg

SEQ ID NO: 3794 - RNA, 21 nt, synthetic construct
  source 1..21: mol_type = other RNA
agtgacaatggccagggccag

SEQ ID NO: 3795 - RNA, 21 nt, synthetic construct
  source 1..21: mol_type = other RNA
agtgagaggtgacccgaatcc

SEQ ID NO: 3796 - RNA, 21 nt, synthetic construct
  source 1..21: mol_type = other RNA
agtgcccttgctgtgccgccg

SEQ ID NO: 3797 - RNA, 21 nt, synthetic construct
  source 1..21: mol_type = other RNA
agtgctccggaaagagcatcc

SEQ ID NO: 3798 - RNA, 21 nt, synthetic construct
  source 1..21: mol_type = other RNA
agtggaggaagacggaacctg

SEQ ID NO: 3799 - RNA, 21 nt, synthetic construct
  source 1..21: mol_type = other RNA
agtggctaagcccagggccag

SEQ ID NO: 3800 - RNA, 21 nt, synthetic construct
  source 1..21: mol_type = other RNA
agtgggccagaggcggcgcag

SEQ ID NO: 3801 - RNA, 21 nt, synthetic construct
  source 1..21: mol_type = other RNA
agtggggtggtcgaaggggaa

SEQ ID NO: 3802 - RNA, 21 nt, synthetic construct
  source 1..21: mol_type = other RNA
agtggtcagcacagagtggct

SEQ ID NO: 3803 - RNA, 21 nt, synthetic construct
  source 1..21: mol_type = other RNA
agtggtccggactcaggagag

SEQ ID NO: 3804 - RNA, 21 nt, synthetic construct
  source 1..21: mol_type = other RNA
agttaaagcgactccaatgcg

SEQ ID NO: 3805 - RNA, 21 nt, synthetic construct
  source 1..21: mol_type = other RNA
agttccggcggcacagcaagg

SEQ ID NO: 3806 - RNA, 21 nt, synthetic construct
  source 1..21: mol_type = other RNA
agttgaagcggctccaattcg

SEQ ID NO: 3807 - RNA, 21 nt, synthetic construct
  source 1..21: mol_type = other RNA
atagaccagactgagctatgg

SEQ ID NO: 3808 - RNA, 21 nt, synthetic construct
  source 1..21: mol_type = other RNA
atagctcagtctggtctatct

SEQ ID NO: 3809 - RNA, 21 nt, synthetic construct
  source 1..21: mol_type = other RNA
atagggtggcaaagcccaggg

SEQ ID NO: 3810 - RNA, 21 nt, synthetic construct
  source 1..21: mol_type = other RNA
atcaccgtttttctggacaac

SEQ ID NO: 3811 - RNA, 21 nt, synthetic construct
  source 1..21: mol_type = other RNA
atcacgtggtgcagcgccgag

SEQ ID NO: 3812 - RNA, 21 nt, synthetic construct
  source 1..21: mol_type = other RNA
atcatcaccgtttttctggac

SEQ ID NO: 3813 - RNA, 21 nt, synthetic construct
  source 1..21: mol_type = other RNA
atccacaggagaacggggtgt

SEQ ID NO: 3814 - RNA, 21 nt, synthetic construct
  source 1..21: mol_type = other RNA
atccctccctcgacttcccct

SEQ ID NO: 3815 - RNA, 21 nt, synthetic construct
  source 1..21: mol_type = other RNA
atccgctcagaggacatcacg

SEQ ID NO: 3816 - RNA, 21 nt, synthetic construct
  source 1..21: mol_type = other RNA
atccgtcggagaaggccatcc

SEQ ID NO: 3817 - RNA, 21 nt, synthetic construct
  source 1..21: mol_type = other RNA
atcctaagaaacgagagatgg

SEQ ID NO: 3818 - RNA, 21 nt, synthetic construct
  source 1..21: mol_type = other RNA
atcctccccgtgtctgggtcc

SEQ ID NO: 3819 - RNA, 21 nt, synthetic construct
  source 1..21: mol_type = other RNA
atcctcttgctttctttgcct

SEQ ID NO: 3820 - RNA, 21 nt, synthetic construct
  source 1..21: mol_type = other RNA
atccttccctgccgcctcctt

SEQ ID NO: 3821 - RNA, 21 nt, synthetic construct
  source 1..21: mol_type = other RNA
atccttgggcagcaacacagc

SEQ ID NO: 3822 - RNA, 21 nt, synthetic construct
  source 1..21: mol_type = other RNA
atcggaagaggggaagtcgag

SEQ ID NO: 3823 - RNA, 21 nt, synthetic construct
  source 1..21: mol_type = other RNA
atctctcctccctcacccaac

SEQ ID NO: 3824 - RNA, 21 nt, synthetic construct
  source 1..21: mol_type = other RNA
atctctcgtttcttaggatgg

SEQ ID NO: 3825 - RNA, 21 nt, synthetic construct
  source 1..21: mol_type = other RNA
atctgcctggccctggccatt

SEQ ID NO: 3826 - RNA, 21 nt, synthetic construct
  source 1..21: mol_type = other RNA
atctgggccagccgtagaggt

SEQ ID NO: 3827 - RNA, 21 nt, synthetic construct
  source 1..21: mol_type = other RNA
atgaaaggagtgagaggtgac

SEQ ID NO: 3828 - RNA, 21 nt, synthetic construct
  source 1..21: mol_type = other RNA
atgatgcaggcctacaagaag

SEQ ID NO: 3829 - RNA, 21 nt, synthetic construct
  source 1..21: mol_type = other RNA
atgcaggcctacaagaagggg

SEQ ID NO: 3830 - RNA, 21 nt, synthetic construct
  source 1..21: mol_type = other RNA
atgcaggtcagagaaagcagg

SEQ ID NO: 3831 - RNA, 21 nt, synthetic construct
  source 1..21: mol_type = other RNA
atgcagtcctccttaccatcc

SEQ ID NO: 3832 - RNA, 21 nt, synthetic construct
  source 1..21: mol_type = other RNA
atgcccggagaggacccagac

SEQ ID NO: 3833 - RNA, 21 nt, synthetic construct
  source 1..21: mol_type = other RNA
atgccgtcttcactcgctggg

SEQ ID NO: 3834 - RNA, 21 nt, synthetic construct
  source 1..21: mol_type = other RNA
atgcggaagagagtaggtcga

SEQ ID NO: 3835 - RNA, 21 nt, synthetic construct
  source 1..21: mol_type = other RNA
atgctctttccggagcacttc

SEQ ID NO: 3836 - RNA, 21 nt, synthetic construct
  source 1..21: mol_type = other RNA
atgctgacaccccgtcccagt

SEQ ID NO: 3837 - RNA, 21 nt, synthetic construct
  source 1..21: mol_type = other RNA
atggagaggtggctaaagcca

SEQ ID NO: 3838 - RNA, 21 nt, synthetic construct
  source 1..21: mol_type = other RNA
atggcacaggccccagaagga

SEQ ID NO: 3839 - RNA, 21 nt, synthetic construct
  source 1..21: mol_type = other RNA
atggccagggccaggcagata

SEQ ID NO: 3840 - RNA, 21 nt, synthetic construct
  source 1..21: mol_type = other RNA
atggccttctccgacggatgt

SEQ ID NO: 3841 - RNA, 21 nt, synthetic construct
  source 1..21: mol_type = other RNA
atgggagctggctcaggttca

SEQ ID NO: 3842 - RNA, 21 nt, synthetic construct
  source 1..21: mol_type = other RNA
atggggttgggtgagggagga

SEQ ID NO: 3843 - RNA, 21 nt, synthetic construct
  source 1..21: mol_type = other RNA
atgggtcagcacaggctgcca

SEQ ID NO: 3844 - RNA, 21 nt, synthetic construct
  source 1..21: mol_type = other RNA
atggtaaggaggactgcatgg

SEQ ID NO: 3845 - RNA, 21 nt, synthetic construct
  source 1..21: mol_type = other RNA
atggtaaggaggcctggggca

SEQ ID NO: 3846 - RNA, 21 nt, synthetic construct
  source 1..21: mol_type = other RNA
atggtaagggggactgggacg

SEQ ID NO: 3847 - RNA, 21 nt, synthetic construct
  source 1..21: mol_type = other RNA
atgtcctctgagcggatcctc

SEQ ID NO: 3848 - RNA, 21 nt, synthetic construct
  source 1..21: mol_type = other RNA
atgtctcccttgcgtcccgcc

SEQ ID NO: 3849 - RNA, 21 nt, synthetic construct
  source 1..21: mol_type = other RNA
atgttgagcccctccagccgg

SEQ ID NO: 3850 - RNA, 21 nt, synthetic construct
  source 1..21: mol_type = other RNA
attccccttcgaccaccccac

SEQ ID NO: 3851 - RNA, 21 nt, synthetic construct
  source 1..21: mol_type = other RNA
attccccttcgacctactctc

SEQ ID NO: 3852 - RNA, 21 nt, synthetic construct
  source 1..21: mol_type = other RNA
attcggaagtggggtggtcga

SEQ ID NO: 3853 - RNA, 21 nt, synthetic construct
  source 1..21: mol_type = other RNA
attcgggtcacctctcactcc

SEQ ID NO: 3854 - RNA, 21 nt, synthetic construct
  source 1..21: mol_type = other RNA
attctctcccctgggcctgtg

SEQ ID NO: 3855 - RNA, 21 nt, synthetic construct
  source 1..21: mol_type = other RNA
attggagccgcttcaactggc

SEQ ID NO: 3856 - RNA, 21 nt, synthetic construct
  source 1..21: mol_type = other RNA
attggagtcgctttaactggc

SEQ ID NO: 3857 - RNA, 21 nt, synthetic construct
  source 1..21: mol_type = other RNA
attgtcactttgcgctgccct

SEQ ID NO: 3858 - RNA, 21 nt, synthetic construct
  source 1..21: mol_type = other RNA
atttgggcagctcccctaccc

SEQ ID NO: 3859 - RNA, 21 nt, synthetic construct
  source 1..21: mol_type = other RNA
caaagaaagcaagaggatgga

SEQ ID NO: 3860 - RNA, 21 nt, synthetic construct
  source 1..21: mol_type = other RNA
caaagccagggccagttaaag

SEQ ID NO: 3861 - RNA, 21 nt, synthetic construct
  source 1..21: mol_type = other RNA
caaagcccagggccaggaacg

SEQ ID NO: 3862 - RNA, 21 nt, synthetic construct
  source 1..21: mol_type = other RNA
caaagtaccccgtctccctgg

SEQ ID NO: 3863 - RNA, 21 nt, synthetic construct
  source 1..21: mol_type = other RNA
caaagtccaggaccggctgga

SEQ ID NO: 3864 - RNA, 21 nt, synthetic construct
  source 1..21: mol_type = other RNA
caaagtgacaatggccagggc

SEQ ID NO: 3865 - RNA, 21 nt, synthetic construct
  source 1..21: mol_type = other RNA
caaagtggtccggactcagga

SEQ ID NO: 3866 - RNA, 21 nt, synthetic construct
  source 1..21: mol_type = other RNA
caaatgaaaggagtgagaggt

SEQ ID NO: 3867 - RNA, 21 nt, synthetic construct
  source 1..21: mol_type = other RNA
caacacagcagagagcaaggg

SEQ ID NO: 3868 - RNA, 21 nt, synthetic construct
  source 1..21: mol_type = other RNA
caacatcggaagaggggaagt

SEQ ID NO: 3869 - RNA, 21 nt, synthetic construct
  source 1..21: mol_type = other RNA
caaccccaaagtaccccgtct

SEQ ID NO: 3870 - RNA, 21 nt, synthetic construct
  source 1..21: mol_type = other RNA
caaccccatgccgtcttcact

SEQ ID NO: 3871 - RNA, 21 nt, synthetic construct
  source 1..21: mol_type = other RNA
caactggccctgggcttagcc

SEQ ID NO: 3872 - RNA, 21 nt, synthetic construct
  source 1..21: mol_type = other RNA
caagaaggggaggcgggacgc

SEQ ID NO: 3873 - RNA, 21 nt, synthetic construct
  source 1..21: mol_type = other RNA
caagaggatggagaggtggct

SEQ ID NO: 3874 - RNA, 21 nt, synthetic construct
  source 1..21: mol_type = other RNA
caagctgcagacagaaagcgg

SEQ ID NO: 3875 - RNA, 21 nt, synthetic construct
  source 1..21: mol_type = other RNA
caaggatgctctttccggagc

SEQ ID NO: 3876 - RNA, 21 nt, synthetic construct
  source 1..21: mol_type = other RNA
caagggagacatccgtcggag

SEQ ID NO: 3877 - RNA, 21 nt, synthetic construct
  source 1..21: mol_type = other RNA
caagggcactcgggggcgaga

SEQ ID NO: 3878 - RNA, 21 nt, synthetic construct
  source 1..21: mol_type = other RNA
caaggggaagagggagtggag

SEQ ID NO: 3879 - RNA, 21 nt, synthetic construct
  source 1..21: mol_type = other RNA
caatgcggaagagagtaggtc

SEQ ID NO: 3880 - RNA, 21 nt, synthetic construct
  source 1..21: mol_type = other RNA
caatggccagggccaggcaga

SEQ ID NO: 3881 - RNA, 21 nt, synthetic construct
  source 1..21: mol_type = other RNA
caattcggaagtggggtggtc

SEQ ID NO: 3882 - RNA, 21 nt, synthetic construct
  source 1..21: mol_type = other RNA
cacaagctgcagacagaaagc

SEQ ID NO: 3883 - RNA, 21 nt, synthetic construct
  source 1..21: mol_type = other RNA
cacagactagagaggtaaggg

SEQ ID NO: 3884 - RNA, 21 nt, synthetic construct
  source 1..21: mol_type = other RNA
cacagagtggctaagcccagg

SEQ ID NO: 3885 - RNA, 21 nt, synthetic construct
  source 1..21: mol_type = other RNA
cacagcaagggcactcggggg

SEQ ID NO: 3886 - RNA, 21 nt, synthetic construct
  source 1..21: mol_type = other RNA
cacagcagagagcaaggggaa

SEQ ID NO: 3887 - RNA, 21 nt, synthetic construct
  source 1..21: mol_type = other RNA
cacaggagaacggggtgtcca

SEQ ID NO: 3888 - RNA, 21 nt, synthetic construct
  source 1..21: mol_type = other RNA
cacaggcccaggggagagaat

SEQ ID NO: 3889 - RNA, 21 nt, synthetic construct
  source 1..21: mol_type = other RNA
cacaggccccagaaggagaag

SEQ ID NO: 3890 - RNA, 21 nt, synthetic construct
  source 1..21: mol_type = other RNA
cacaggctgccaaagccaggg

SEQ ID NO: 3891 - RNA, 21 nt, synthetic construct
  source 1..21: mol_type = other RNA
caccacgtgatgtcctctgag

SEQ ID NO: 3892 - RNA, 21 nt, synthetic construct
  source 1..21: mol_type = other RNA
cacccaaccccatgccgtctt

SEQ ID NO: 3893 - RNA, 21 nt, synthetic construct
  source 1..21: mol_type = other RNA
caccccacttccgaattggag

SEQ ID NO: 3894 - RNA, 21 nt, synthetic construct
  source 1..21: mol_type = other RNA
caccccgtcccagtccccctt

SEQ ID NO: 3895 - RNA, 21 nt, synthetic construct
  source 1..21: mol_type = other RNA
caccccgttctcctgtggatt

SEQ ID NO: 3896 - RNA, 21 nt, synthetic construct
  source 1..21: mol_type = other RNA
caccctatgctgacaccccgt

SEQ ID NO: 3897 - RNA, 21 nt, synthetic construct
  source 1..21: mol_type = other RNA
caccgtttttctggacaaccc

SEQ ID NO: 3898 - RNA, 21 nt, synthetic construct
  source 1..21: mol_type = other RNA
cacctctacggctggcccaga

SEQ ID NO: 3899 - RNA, 21 nt, synthetic construct
  source 1..21: mol_type = other RNA
cacctctcactcctttcattt

SEQ ID NO: 3900 - RNA, 21 nt, synthetic construct
  source 1..21: mol_type = other RNA
cacctctccatcctcttgctt

SEQ ID NO: 3901 - RNA, 21 nt, synthetic construct
  source 1..21: mol_type = other RNA
cacggggaggatccgctcaga

SEQ ID NO: 3902 - RNA, 21 nt, synthetic construct
  source 1..21: mol_type = other RNA
cacgtgatgtcctctgagcgg

SEQ ID NO: 3903 - RNA, 21 nt, synthetic construct
  source 1..21: mol_type = other RNA
cacgtggtgcagcgccgagaa

SEQ ID NO: 3904 - RNA, 21 nt, synthetic construct
  source 1..21: mol_type = other RNA
cactccctcttccccttgctc

SEQ ID NO: 3905 - RNA, 21 nt, synthetic construct
  source 1..21: mol_type = other RNA
cactcctttcatttgggcagc

SEQ ID NO: 3906 - RNA, 21 nt, synthetic construct
  source 1..21: mol_type = other RNA
cactcgctgggttcccttttc

SEQ ID NO: 3907 - RNA, 21 nt, synthetic construct
  source 1..21: mol_type = other RNA
cactcgggggcgagaggaggg

SEQ ID NO: 3908 - RNA, 21 nt, synthetic construct
  source 1..21: mol_type = other RNA
cactctgccccaggcctcctt

SEQ ID NO: 3909 - RNA, 21 nt, synthetic construct
  source 1..21: mol_type = other RNA
cactctgtgctgaccactctg

SEQ ID NO: 3910 - RNA, 21 nt, synthetic construct
  source 1..21: mol_type = other RNA
cactgtttccccttcccaggc

SEQ ID NO: 3911 - RNA, 21 nt, synthetic construct
  source 1..21: mol_type = other RNA
cacttccgaattggagccgct

SEQ ID NO: 3912 - RNA, 21 nt, synthetic construct
  source 1..21: mol_type = other RNA
cacttccttctcggcgctgca

SEQ ID NO: 3913 - RNA, 21 nt, synthetic construct
  source 1..21: mol_type = other RNA
cactttgagctctactggctt

SEQ ID NO: 3914 - RNA, 21 nt, synthetic construct
  source 1..21: mol_type = other RNA
cactttgcgctgccctcctct

SEQ ID NO: 3915 - RNA, 21 nt, synthetic construct
  source 1..21: mol_type = other RNA
cagaaaaacggtgatgatgca

SEQ ID NO: 3916 - RNA, 21 nt, synthetic construct
  source 1..21: mol_type = other RNA
cagaaagcggcacaggcccag

SEQ ID NO: 3917 - RNA, 21 nt, synthetic construct
  source 1..21: mol_type = other RNA
cagaagccagtagagctcaaa

SEQ ID NO: 3918 - RNA, 21 nt, synthetic construct
  source 1..21: mol_type = other RNA
cagaaggagaaggaaaaggga

SEQ ID NO: 3919 - RNA, 21 nt, synthetic construct
  source 1..21: mol_type = other RNA
cagacacggggaggatccgct

SEQ ID NO: 3920 - RNA, 21 nt, synthetic construct
  source 1..21: mol_type = other RNA
cagacagaaagcggcacaggc

SEQ ID NO: 3921 - RNA, 21 nt, synthetic construct
  source 1..21: mol_type = other RNA
cagactagagaggtaaggggg

SEQ ID NO: 3922 - RNA, 21 nt, synthetic construct
  source 1..21: mol_type = other RNA
cagactgagctatgggagctg

SEQ ID NO: 3923 - RNA, 21 nt, synthetic construct
  source 1..21: mol_type = other RNA
cagagaaagcaggacctgcct

SEQ ID NO: 3924 - RNA, 21 nt, synthetic construct
  source 1..21: mol_type = other RNA
cagagagcaaggggaagaggg

SEQ ID NO: 3925 - RNA, 21 nt, synthetic construct
  source 1..21: mol_type = other RNA
cagaggacatcacgtggtgca

SEQ ID NO: 3926 - RNA, 21 nt, synthetic construct
  source 1..21: mol_type = other RNA
cagaggcggcgcagaagccag

SEQ ID NO: 3927 - RNA, 21 nt, synthetic construct
  source 1..21: mol_type = other RNA
cagagtggctaagcccagggc

SEQ ID NO: 3928 - RNA, 21 nt, synthetic construct
  source 1..21: mol_type = other RNA
cagagtggtcagcacagagtg

SEQ ID NO: 3929 - RNA, 21 nt, synthetic construct
  source 1..21: mol_type = other RNA
cagagttccggcggcacagca

SEQ ID NO: 3930 - RNA, 21 nt, synthetic construct
  source 1..21: mol_type = other RNA
cagatagaccagactgagcta

SEQ ID NO: 3931 - RNA, 21 nt, synthetic construct
  source 1..21: mol_type = other RNA
cagatccttccctgccgcctc

SEQ ID NO: 3932 - RNA, 21 nt, synthetic construct
  source 1..21: mol_type = other RNA
cagcaacacagcagagagcaa

SEQ ID NO: 3933 - RNA, 21 nt, synthetic construct
  source 1..21: mol_type = other RNA
cagcaagggcactcgggggcg

SEQ ID NO: 3934 - RNA, 21 nt, synthetic construct
  source 1..21: mol_type = other RNA
cagcacagagtggctaagccc

SEQ ID NO: 3935 - RNA, 21 nt, synthetic construct
  source 1..21: mol_type = other RNA
cagcacaggctgccaaagcca

SEQ ID NO: 3936 - RNA, 21 nt, synthetic construct
  source 1..21: mol_type = other RNA
cagcagagagcaaggggaaga

SEQ ID NO: 3937 - RNA, 21 nt, synthetic construct
  source 1..21: mol_type = other RNA
cagcatagggtggcaaagccc

SEQ ID NO: 3938 - RNA, 21 nt, synthetic construct
  source 1..21: mol_type = other RNA
cagccggtcctggactttgtc

SEQ ID NO: 3939 - RNA, 21 nt, synthetic construct
  source 1..21: mol_type = other RNA
cagccgtagaggtgacccagg

SEQ ID NO: 3940 - RNA, 21 nt, synthetic construct
  source 1..21: mol_type = other RNA
cagcctgtgctgacccatgca

SEQ ID NO: 3941 - RNA, 21 nt, synthetic construct
  source 1..21: mol_type = other RNA
cagcgagtgaagacggcatgg

SEQ ID NO: 3942 - RNA, 21 nt, synthetic construct
  source 1..21: mol_type = other RNA
cagcgcaaagtgacaatggcc

SEQ ID NO: 3943 - RNA, 21 nt, synthetic construct
  source 1..21: mol_type = other RNA
cagcgccgagaaggaagtgct

SEQ ID NO: 3944 - RNA, 21 nt, synthetic construct
  source 1..21: mol_type = other RNA
cagcgttagagggcagagttc

SEQ ID NO: 3945 - RNA, 21 nt, synthetic construct
  source 1..21: mol_type = other RNA
cagctcccatagctcagtctg

SEQ ID NO: 3946 - RNA, 21 nt, synthetic construct
  source 1..21: mol_type = other RNA
cagctcccctaccccccttac

SEQ ID NO: 3947 - RNA, 21 nt, synthetic construct
  source 1..21: mol_type = other RNA
cagcttgtggcctgggtcacc

SEQ ID NO: 3948 - RNA, 21 nt, synthetic construct
  source 1..21: mol_type = other RNA
caggaccggctggaggggctc

SEQ ID NO: 3949 - RNA, 21 nt, synthetic construct
  source 1..21: mol_type = other RNA
caggacctgcctgggaagggg

SEQ ID NO: 3950 - RNA, 21 nt, synthetic construct
  source 1..21: mol_type = other RNA
caggagaacggggtgtccagg

SEQ ID NO: 3951 - RNA, 21 nt, synthetic construct
  source 1..21: mol_type = other RNA
caggagagagacggcagcgtt

SEQ ID NO: 3952 - RNA, 21 nt, synthetic construct
  source 1..21: mol_type = other RNA
caggagagggcagggcaggga

SEQ ID NO: 3953 - RNA, 21 nt, synthetic construct
  source 1..21: mol_type = other RNA
caggcaaagaaagcaagagga

SEQ ID NO: 3954 - RNA, 21 nt, synthetic construct
  source 1..21: mol_type = other RNA
caggcagatagaccagactga

SEQ ID NO: 3955 - RNA, 21 nt, synthetic construct
  source 1..21: mol_type = other RNA
caggcaggtcctgctttctct

SEQ ID NO: 3956 - RNA, 21 nt, synthetic construct
  source 1..21: mol_type = other RNA
caggccacaagctgcagacag

SEQ ID NO: 3957 - RNA, 21 nt, synthetic construct
  source 1..21: mol_type = other RNA
caggcccaggggagagaatgc

SEQ ID NO: 3958 - RNA, 21 nt, synthetic construct
  source 1..21: mol_type = other RNA
caggccccagaaggagaagga

SEQ ID NO: 3959 - RNA, 21 nt, synthetic construct
  source 1..21: mol_type = other RNA
caggcctacaagaaggggagg

SEQ ID NO: 3960 - RNA, 21 nt, synthetic construct
  source 1..21: mol_type = other RNA
caggcctccttaccattcccc

SEQ ID NO: 3961 - RNA, 21 nt, synthetic construct
  source 1..21: mol_type = other RNA
caggctgccaaagccagggcc

SEQ ID NO: 3962 - RNA, 21 nt, synthetic construct
  source 1..21: mol_type = other RNA
cagggaaggagacaaagtcca

SEQ ID NO: 3963 - RNA, 21 nt, synthetic construct
  source 1..21: mol_type = other RNA
cagggaaggatctgggccagc

SEQ ID NO: 3964 - RNA, 21 nt, synthetic construct
  source 1..21: mol_type = other RNA
cagggagacggggtactttgg

SEQ ID NO: 3965 - RNA, 21 nt, synthetic construct
  source 1..21: mol_type = other RNA
cagggcagggaaggagacaaa

SEQ ID NO: 3966 - RNA, 21 nt, synthetic construct
  source 1..21: mol_type = other RNA
cagggccaggcagatagacca

SEQ ID NO: 3967 - RNA, 21 nt, synthetic construct
  source 1..21: mol_type = other RNA
cagggccagttaaagcgactc

SEQ ID NO: 3968 - RNA, 21 nt, synthetic construct
  source 1..21: mol_type = other RNA
cagggccagttgaagcggctc

SEQ ID NO: 3969 - RNA, 21 nt, synthetic construct
  source 1..21: mol_type = other RNA
caggggagagaatgcaggtca

SEQ ID NO: 3970 - RNA, 21 nt, synthetic construct
  source 1..21: mol_type = other RNA
caggtcagagaaagcaggacc

SEQ ID NO: 3971 - RNA, 21 nt, synthetic construct
  source 1..21: mol_type = other RNA
caggtcctgctttctctgacc

SEQ ID NO: 3972 - RNA, 21 nt, synthetic construct
  source 1..21: mol_type = other RNA
caggttcaggagagggcaggg

SEQ ID NO: 3973 - RNA, 21 nt, synthetic construct
  source 1..21: mol_type = other RNA
caggttccgtcttcctccact

SEQ ID NO: 3974 - RNA, 21 nt, synthetic construct
  source 1..21: mol_type = other RNA
cagtagagctcaaagtggtcc

SEQ ID NO: 3975 - RNA, 21 nt, synthetic construct
  source 1..21: mol_type = other RNA
cagtcccccttaccattcccc

SEQ ID NO: 3976 - RNA, 21 nt, synthetic construct
  source 1..21: mol_type = other RNA
cagtcctccttaccatccctc

SEQ ID NO: 3977 - RNA, 21 nt, synthetic construct
  source 1..21: mol_type = other RNA
cagtctggtctatctgcctgg

SEQ ID NO: 3978 - RNA, 21 nt, synthetic construct
  source 1..21: mol_type = other RNA
cagtgggccagaggcggcgca

SEQ ID NO: 3979 - RNA, 21 nt, synthetic construct
  source 1..21: mol_type = other RNA
cagttaaagcgactccaatgc

SEQ ID NO: 3980 - RNA, 21 nt, synthetic construct
  source 1..21: mol_type = other RNA
cagttgaagcggctccaattc

SEQ ID NO: 3981 - RNA, 21 nt, synthetic construct
  source 1..21: mol_type = other RNA
catagctcagtctggtctatc

SEQ ID NO: 3982 - RNA, 21 nt, synthetic construct
  source 1..21: mol_type = other RNA
catagggtggcaaagcccagg

SEQ ID NO: 3983 - RNA, 21 nt, synthetic construct
  source 1..21: mol_type = other RNA
catcaccgtttttctggacaa

SEQ ID NO: 3984 - RNA, 21 nt, synthetic construct
  source 1..21: mol_type = other RNA
catcacgtggtgcagcgccga

SEQ ID NO: 3985 - RNA, 21 nt, synthetic construct
  source 1..21: mol_type = other RNA
catcatcaccgtttttctgga

SEQ ID NO: 3986 - RNA, 21 nt, synthetic construct
  source 1..21: mol_type = other RNA
catccctccctcgacttcccc

SEQ ID NO: 3987 - RNA, 21 nt, synthetic construct
  source 1..21: mol_type = other RNA
catccgtcggagaaggccatc

SEQ ID NO: 3988 - RNA, 21 nt, synthetic construct
  source 1..21: mol_type = other RNA
catcctaagaaacgagagatg

SEQ ID NO: 3989 - RNA, 21 nt, synthetic construct
  source 1..21: mol_type = other RNA
catcctcttgctttctttgcc

SEQ ID NO: 3990 - RNA, 21 nt, synthetic construct
  source 1..21: mol_type = other RNA
catccttgggcagcaacacag

SEQ ID NO: 3991 - RNA, 21 nt, synthetic construct
  source 1..21: mol_type = other RNA
catcggaagaggggaagtcga

SEQ ID NO: 3992 - RNA, 21 nt, synthetic construct
  source 1..21: mol_type = other RNA
catctctcctccctcacccaa

SEQ ID NO: 3993 - RNA, 21 nt, synthetic construct
  source 1..21: mol_type = other RNA
catctctcgtttcttaggatg

SEQ ID NO: 3994 - RNA, 21 nt, synthetic construct
  source 1..21: mol_type = other RNA
catgcagtcctccttaccatc

SEQ ID NO: 3995 - RNA, 21 nt, synthetic construct
  source 1..21: mol_type = other RNA
catgccgtcttcactcgctgg

SEQ ID NO: 3996 - RNA, 21 nt, synthetic construct
  source 1..21: mol_type = other RNA
catggggttgggtgagggagg

SEQ ID NO: 3997 - RNA, 21 nt, synthetic construct
  source 1..21: mol_type = other RNA
catgggtcagcacaggctgcc

SEQ ID NO: 3998 - RNA, 21 nt, synthetic construct
  source 1..21: mol_type = other RNA
cattccccttcgaccacccca

SEQ ID NO: 3999 - RNA, 21 nt, synthetic construct
  source 1..21: mol_type = other RNA
cattccccttcgacctactct

SEQ ID NO: 4000 - RNA, 21 nt, synthetic construct
  source 1..21: mol_type = other RNA
cattctctcccctgggcctgt

SEQ ID NO: 4001 - RNA, 21 nt, synthetic construct
  source 1..21: mol_type = other RNA
cattggagtcgctttaactgg

SEQ ID NO: 4002 - RNA, 21 nt, synthetic construct
  source 1..21: mol_type = other RNA
cattgtcactttgcgctgccc

SEQ ID NO: 4003 - RNA, 21 nt, synthetic construct
  source 1..21: mol_type = other RNA
catttgggcagctcccctacc

SEQ ID NO: 4004 - RNA, 21 nt, synthetic construct
  source 1..21: mol_type = other RNA
ccaaagccagggccagttaaa

SEQ ID NO: 4005 - RNA, 21 nt, synthetic construct
  source 1..21: mol_type = other RNA
ccaaagtaccccgtctccctg

SEQ ID NO: 4006 - RNA, 21 nt, synthetic construct
  source 1..21: mol_type = other RNA
ccaaatgaaaggagtgagagg

SEQ ID NO: 4007 - RNA, 21 nt, synthetic construct
  source 1..21: mol_type = other RNA
ccaaccccatgccgtcttcac

SEQ ID NO: 4008 - RNA, 21 nt, synthetic construct
  source 1..21: mol_type = other RNA
ccaaggatgctctttccggag

SEQ ID NO: 4009 - RNA, 21 nt, synthetic construct
  source 1..21: mol_type = other RNA
ccaatgcggaagagagtaggt

SEQ ID NO: 4010 - RNA, 21 nt, synthetic construct
  source 1..21: mol_type = other RNA
ccaattcggaagtggggtggt

SEQ ID NO: 4011 - RNA, 21 nt, synthetic construct
  source 1..21: mol_type = other RNA
ccacaagctgcagacagaaag

SEQ ID NO: 4012 - RNA, 21 nt, synthetic construct
  source 1..21: mol_type = other RNA
ccacaggagaacggggtgtcc

SEQ ID NO: 4013 - RNA, 21 nt, synthetic construct
  source 1..21: mol_type = other RNA
ccaccccacttccgaattgga

SEQ ID NO: 4014 - RNA, 21 nt, synthetic construct
  source 1..21: mol_type = other RNA
ccaccctatgctgacaccccg

SEQ ID NO: 4015 - RNA, 21 nt, synthetic construct
  source 1..21: mol_type = other RNA
ccacctctccatcctcttgct

SEQ ID NO: 4016 - RNA, 21 nt, synthetic construct
  source 1..21: mol_type = other RNA
ccacgtgatgtcctctgagcg

SEQ ID NO: 4017 - RNA, 21 nt, synthetic construct
  source 1..21: mol_type = other RNA
ccactccctcttccccttgct

SEQ ID NO: 4018 - RNA, 21 nt, synthetic construct
  source 1..21: mol_type = other RNA
ccactctgccccaggcctcct

SEQ ID NO: 4019 - RNA, 21 nt, synthetic construct
  source 1..21: mol_type = other RNA
ccactctgtgctgaccactct

SEQ ID NO: 4020 - RNA, 21 nt, synthetic construct
  source 1..21: mol_type = other RNA
ccactgtttccccttcccagg

SEQ ID NO: 4021 - RNA, 21 nt, synthetic construct
  source 1..21: mol_type = other RNA
ccacttccgaattggagccgc

SEQ ID NO: 4022 - RNA, 21 nt, synthetic construct
  source 1..21: mol_type = other RNA
ccactttgagctctactggct

SEQ ID NO: 4023 - RNA, 21 nt, synthetic construct
  source 1..21: mol_type = other RNA
ccagaaaaacggtgatgatgc

SEQ ID NO: 4024 - RNA, 21 nt, synthetic construct
  source 1..21: mol_type = other RNA
ccagaaggagaaggaaaaggg

SEQ ID NO: 4025 - RNA, 21 nt, synthetic construct
  source 1..21: mol_type = other RNA
ccagacacggggaggatccgc

SEQ ID NO: 4026 - RNA, 21 nt, synthetic construct
  source 1..21: mol_type = other RNA
ccagactgagctatgggagct

SEQ ID NO: 4027 - RNA, 21 nt, synthetic construct
  source 1..21: mol_type = other RNA
ccagaggcggcgcagaagcca

SEQ ID NO: 4028 - RNA, 21 nt, synthetic construct
  source 1..21: mol_type = other RNA
ccagatccttccctgccgcct

SEQ ID NO: 4029 - RNA, 21 nt, synthetic construct
  source 1..21: mol_type = other RNA
ccagccggtcctggactttgt

SEQ ID NO: 4030 - RNA, 21 nt, synthetic construct
  source 1..21: mol_type = other RNA
ccagccgtagaggtgacccag

SEQ ID NO: 4031 - RNA, 21 nt, synthetic construct
  source 1..21: mol_type = other RNA
ccagcgagtgaagacggcatg

SEQ ID NO: 4032 - RNA, 21 nt, synthetic construct
  source 1..21: mol_type = other RNA
ccagctcccatagctcagtct

SEQ ID NO: 4033 - RNA, 21 nt, synthetic construct
  source 1..21: mol_type = other RNA
ccaggaccggctggaggggct

SEQ ID NO: 4034 - RNA, 21 nt, synthetic construct
  source 1..21: mol_type = other RNA
ccaggcaaagaaagcaagagg

SEQ ID NO: 4035 - RNA, 21 nt, synthetic construct
  source 1..21: mol_type = other RNA
ccaggcagatagaccagactg

SEQ ID NO: 4036 - RNA, 21 nt, synthetic construct
  source 1..21: mol_type = other RNA
ccaggcaggtcctgctttctc

SEQ ID NO: 4037 - RNA, 21 nt, synthetic construct
  source 1..21: mol_type = other RNA
ccaggccacaagctgcagaca

SEQ ID NO: 4038 - RNA, 21 nt, synthetic construct
  source 1..21: mol_type = other RNA
ccaggcctccttaccattccc

SEQ ID NO: 4039 - RNA, 21 nt, synthetic construct
  source 1..21: mol_type = other RNA
ccagggagacggggtactttg

SEQ ID NO: 4040 - RNA, 21 nt, synthetic construct
  source 1..21: mol_type = other RNA
ccagggccaggcagatagacc

SEQ ID NO: 4041 - RNA, 21 nt, synthetic construct
  source 1..21: mol_type = other RNA
ccagggccagttaaagcgact

SEQ ID NO: 4042 - RNA, 21 nt, synthetic construct
  source 1..21: mol_type = other RNA
ccagggccagttgaagcggct

SEQ ID NO: 4043 - RNA, 21 nt, synthetic construct
  source 1..21: mol_type = other RNA
ccaggggagagaatgcaggtc

SEQ ID NO: 4044 - RNA, 21 nt, synthetic construct
  source 1..21: mol_type = other RNA
ccagtagagctcaaagtggtc

SEQ ID NO: 4045 - RNA, 21 nt, synthetic construct
  source 1..21: mol_type = other RNA
ccagtcccccttaccattccc

SEQ ID NO: 4046 - RNA, 21 nt, synthetic construct
  source 1..21: mol_type = other RNA
ccagttaaagcgactccaatg

SEQ ID NO: 4047 - RNA, 21 nt, synthetic construct
  source 1..21: mol_type = other RNA
ccagttgaagcggctccaatt

SEQ ID NO: 4048 - RNA, 21 nt, synthetic construct
  source 1..21: mol_type = other RNA
ccatagctcagtctggtctat

SEQ ID NO: 4049 - RNA, 21 nt, synthetic construct
  source 1..21: mol_type = other RNA
ccatccctccctcgacttccc

SEQ ID NO: 4050 - RNA, 21 nt, synthetic construct
  source 1..21: mol_type = other RNA
ccatcctaagaaacgagagat

SEQ ID NO: 4051 - RNA, 21 nt, synthetic construct
  source 1..21: mol_type = other RNA
ccatcctcttgctttctttgc

SEQ ID NO: 4052 - RNA, 21 nt, synthetic construct
  source 1..21: mol_type = other RNA
ccatctctcgtttcttaggat

SEQ ID NO: 4053 - RNA, 21 nt, synthetic construct
  source 1..21: mol_type = other RNA
ccatgcagtcctccttaccat

SEQ ID NO: 4054 - RNA, 21 nt, synthetic construct
  source 1..21: mol_type = other RNA
ccatgccgtcttcactcgctg

SEQ ID NO: 4055 - RNA, 21 nt, synthetic construct
  source 1..21: mol_type = other RNA
ccattccccttcgaccacccc

SEQ ID NO: 4056 - RNA, 21 nt, synthetic construct
  source 1..21: mol_type = other RNA
ccattccccttcgacctactc

SEQ ID NO: 4057 - RNA, 21 nt, synthetic construct
  source 1..21: mol_type = other RNA
ccattgtcactttgcgctgcc

SEQ ID NO: 4058 - RNA, 21 nt, synthetic construct
  source 1..21: mol_type = other RNA
cccaaagtaccccgtctccct

SEQ ID NO: 4059 - RNA, 21 nt, synthetic construct
  source 1..21: mol_type = other RNA
cccaaatgaaaggagtgagag

SEQ ID NO: 4060 - RNA, 21 nt, synthetic construct
  source 1..21: mol_type = other RNA
cccaaccccatgccgtcttca

SEQ ID NO: 4061 - RNA, 21 nt, synthetic construct
  source 1..21: mol_type = other RNA
cccaaggatgctctttccgga

SEQ ID NO: 4062 - RNA, 21 nt, synthetic construct
  source 1..21: mol_type = other RNA
cccactgtttccccttcccag

SEQ ID NO: 4063 - RNA, 21 nt, synthetic construct
  source 1..21: mol_type = other RNA
cccacttccgaattggagccg

SEQ ID NO: 4064 - RNA, 21 nt, synthetic construct
  source 1..21: mol_type = other RNA
cccagaaggagaaggaaaagg

SEQ ID NO: 4065 - RNA, 21 nt, synthetic construct
  source 1..21: mol_type = other RNA
cccagacacggggaggatccg

SEQ ID NO: 4066 - RNA, 21 nt, synthetic construct
  source 1..21: mol_type = other RNA
cccagatccttccctgccgcc

SEQ ID NO: 4067 - RNA, 21 nt, synthetic construct
  source 1..21: mol_type = other RNA
cccagcgagtgaagacggcat

SEQ ID NO: 4068 - RNA, 21 nt, synthetic construct
  source 1..21: mol_type = other RNA
cccaggcaggtcctgctttct

SEQ ID NO: 4069 - RNA, 21 nt, synthetic construct
  source 1..21: mol_type = other RNA
cccaggccacaagctgcagac

SEQ ID NO: 4070 - RNA, 21 nt, synthetic construct
  source 1..21: mol_type = other RNA
cccaggcctccttaccattcc

SEQ ID NO: 4071 - RNA, 21 nt, synthetic construct
  source 1..21: mol_type = other RNA
cccagggccagttgaagcggc

SEQ ID NO: 4072 - RNA, 21 nt, synthetic construct
  source 1..21: mol_type = other RNA
cccaggggagagaatgcaggt

SEQ ID NO: 4073 - RNA, 21 nt, synthetic construct
  source 1..21: mol_type = other RNA
cccagtcccccttaccattcc

SEQ ID NO: 4074 - RNA, 21 nt, synthetic construct
  source 1..21: mol_type = other RNA
cccatagctcagtctggtcta

SEQ ID NO: 4075 - RNA, 21 nt, synthetic construct
  source 1..21: mol_type = other RNA
cccatgcagtcctccttacca

SEQ ID NO: 4076 - RNA, 21 nt, synthetic construct
  source 1..21: mol_type = other RNA
cccatgccgtcttcactcgct

SEQ ID NO: 4077 - RNA, 21 nt, synthetic construct
  source 1..21: mol_type = other RNA
ccccaaagtaccccgtctccc

SEQ ID NO: 4078 - RNA, 21 nt, synthetic construct
  source 1..21: mol_type = other RNA
ccccacttccgaattggagcc

SEQ ID NO: 4079 - RNA, 21 nt, synthetic construct
  source 1..21: mol_type = other RNA
ccccagaaggagaaggaaaag

SEQ ID NO: 4080 - RNA, 21 nt, synthetic construct
  source 1..21: mol_type = other RNA
ccccaggcctccttaccattc

SEQ ID NO: 4081 - RNA, 21 nt, synthetic construct
  source 1..21: mol_type = other RNA
ccccatgccgtcttcactcgc

SEQ ID NO: 4082 - RNA, 21 nt, synthetic construct
  source 1..21: mol_type = other RNA
ccccccttacctctctagtct

SEQ ID NO: 4083 - RNA, 21 nt, synthetic construct
  source 1..21: mol_type = other RNA
cccccgagtgcccttgctgtg

SEQ ID NO: 4084 - RNA, 21 nt, synthetic construct
  source 1..21: mol_type = other RNA
cccccttaccattccccttcg

SEQ ID NO: 4085 - RNA, 21 nt, synthetic construct
  source 1..21: mol_type = other RNA
cccccttacctctctagtctg

SEQ ID NO: 4086 - RNA, 21 nt, synthetic construct
  source 1..21: mol_type = other RNA
ccccgagtgcccttgctgtgc

SEQ ID NO: 4087 - RNA, 21 nt, synthetic construct
  source 1..21: mol_type = other RNA
ccccgtcccagtcccccttac

SEQ ID NO: 4088 - RNA, 21 nt, synthetic construct
  source 1..21: mol_type = other RNA
ccccgtcgttcctggccctgg

SEQ ID NO: 4089 - RNA, 21 nt, synthetic construct
  source 1..21: mol_type = other RNA
ccccgtctccctggctttagc

SEQ ID NO: 4090 - RNA, 21 nt, synthetic construct
  source 1..21: mol_type = other RNA
ccccgtgtctgggtcctctcc

SEQ ID NO: 4091 - RNA, 21 nt, synthetic construct
  source 1..21: mol_type = other RNA
ccccgttctcctgtggattcg

SEQ ID NO: 4092 - RNA, 21 nt, synthetic construct
  source 1..21: mol_type = other RNA
cccctaccccccttacctctc

SEQ ID NO: 4093 - RNA, 21 nt, synthetic construct
  source 1..21: mol_type = other RNA
cccctccagccggtcctggac

SEQ ID NO: 4094 - RNA, 21 nt, synthetic construct
  source 1..21: mol_type = other RNA
cccctcttccgatgttgagcc

SEQ ID NO: 4095 - RNA, 21 nt, synthetic construct
  source 1..21: mol_type = other RNA
cccctgggcctgtgccgcttt

SEQ ID NO: 4096 - RNA, 21 nt, synthetic construct
  source 1..21: mol_type = other RNA
ccccttaccattccccttcga

SEQ ID NO: 4097 - RNA, 21 nt, synthetic construct
  source 1..21: mol_type = other RNA
ccccttacctctctagtctgt

SEQ ID NO: 4098 - RNA, 21 nt, synthetic construct
  source 1..21: mol_type = other RNA
ccccttcccaggcaggtcctg

SEQ ID NO: 4099 - RNA, 21 nt, synthetic construct
  source 1..21: mol_type = other RNA
ccccttcgaccaccccacttc

SEQ ID NO: 4100 - RNA, 21 nt, synthetic construct
  source 1..21: mol_type = other RNA
ccccttcgacctactctcttc

SEQ ID NO: 4101 - RNA, 21 nt, synthetic construct
  source 1..21: mol_type = other RNA
ccccttcttgtaggcctgcat

SEQ ID NO: 4102 - RNA, 21 nt, synthetic construct
  source 1..21: mol_type = other RNA
ccccttgctctctgctgtgtt

SEQ ID NO: 4103 - RNA, 21 nt, synthetic construct
  source 1..21: mol_type = other RNA
cccgaatccacaggagaacgg

SEQ ID NO: 4104 - RNA, 21 nt, synthetic construct
  source 1..21: mol_type = other RNA
cccgagtgcccttgctgtgcc

SEQ ID NO: 4105 - RNA, 21 nt, synthetic construct
  source 1..21: mol_type = other RNA
cccgcctccccttcttgtagg

SEQ ID NO: 4106 - RNA, 21 nt, synthetic construct
  source 1..21: mol_type = other RNA
cccggagaggacccagacacg

SEQ ID NO: 4107 - RNA, 21 nt, synthetic construct
  source 1..21: mol_type = other RNA
cccgtcccagtcccccttacc

SEQ ID NO: 4108 - RNA, 21 nt, synthetic construct
  source 1..21: mol_type = other RNA
cccgtcgttcctggccctggg

SEQ ID NO: 4109 - RNA, 21 nt, synthetic construct
  source 1..21: mol_type = other RNA
cccgtctccctggctttagcc

SEQ ID NO: 4110 - RNA, 21 nt, synthetic construct
  source 1..21: mol_type = other RNA
cccgtgtctgggtcctctccg

SEQ ID NO: 4111 - RNA, 21 nt, synthetic construct
  source 1..21: mol_type = other RNA
cccgttctcctgtggattcgg

SEQ ID NO: 4112 - RNA, 21 nt, synthetic construct
  source 1..21: mol_type = other RNA
ccctaccccccttacctctct

SEQ ID NO: 4113 - RNA, 21 nt, synthetic construct
  source 1..21: mol_type = other RNA
ccctatgctgacaccccgtcc

SEQ ID NO: 4114 - RNA, 21 nt, synthetic construct
  source 1..21: mol_type = other RNA
ccctcacccaaccccatgccg

SEQ ID NO: 4115 - RNA, 21 nt, synthetic construct
  source 1..21: mol_type = other RNA
ccctccagccggtcctggact

SEQ ID NO: 4116 - RNA, 21 nt, synthetic construct
  source 1..21: mol_type = other RNA
ccctccctcgacttcccctct

SEQ ID NO: 4117 - RNA, 21 nt, synthetic construct
  source 1..21: mol_type = other RNA
ccctcctctcgcccccgagtg

SEQ ID NO: 4118 - RNA, 21 nt, synthetic construct
  source 1..21: mol_type = other RNA
ccctcgacttcccctcttccg

SEQ ID NO: 4119 - RNA, 21 nt, synthetic construct
  source 1..21: mol_type = other RNA
ccctctaacgctgccgtctct

SEQ ID NO: 4120 - RNA, 21 nt, synthetic construct
  source 1..21: mol_type = other RNA
ccctctcctgaacctgagcca

SEQ ID NO: 4121 - RNA, 21 nt, synthetic construct
  source 1..21: mol_type = other RNA
ccctcttccccttgctctctg

SEQ ID NO: 4122 - RNA, 21 nt, synthetic construct
  source 1..21: mol_type = other RNA
ccctcttccgatgttgagccc

SEQ ID NO: 4123 - RNA, 21 nt, synthetic construct
  source 1..21: mol_type = other RNA
ccctgccctctcctgaacctg

SEQ ID NO: 4124 - RNA, 21 nt, synthetic construct
  source 1..21: mol_type = other RNA
ccctgccctgccctctcctga

SEQ ID NO: 4125 - RNA, 21 nt, synthetic construct
  source 1..21: mol_type = other RNA
ccctgccgcctccttcaggtt

SEQ ID NO: 4126 - RNA, 21 nt, synthetic construct
  source 1..21: mol_type = other RNA
ccctggccattgtcactttgc

SEQ ID NO: 4127 - RNA, 21 nt, synthetic construct
  source 1..21: mol_type = other RNA
ccctggctttagccacctctc

SEQ ID NO: 4128 - RNA, 21 nt, synthetic construct
  source 1..21: mol_type = other RNA
ccctggctttggcagcctgtg

SEQ ID NO: 4129 - RNA, 21 nt, synthetic construct
  source 1..21: mol_type = other RNA
ccctgggcctgtgccgctttc

SEQ ID NO: 4130 - RNA, 21 nt, synthetic construct
  source 1..21: mol_type = other RNA
ccctgggcttagccactctgt

SEQ ID NO: 4131 - RNA, 21 nt, synthetic construct
  source 1..21: mol_type = other RNA
ccctgggctttgccaccctat

SEQ ID NO: 4132 - RNA, 21 nt, synthetic construct
  source 1..21: mol_type = other RNA
cccttaccattccccttcgac

SEQ ID NO: 4133 - RNA, 21 nt, synthetic construct
  source 1..21: mol_type = other RNA
cccttcccaggcaggtcctgc

SEQ ID NO: 4134 - RNA, 21 nt, synthetic construct
  source 1..21: mol_type = other RNA
cccttcgaccaccccacttcc

SEQ ID NO: 4135 - RNA, 21 nt, synthetic construct
  source 1..21: mol_type = other RNA
cccttcgacctactctcttcc

SEQ ID NO: 4136 - RNA, 21 nt, synthetic construct
  source 1..21: mol_type = other RNA
cccttcttgtaggcctgcatc

SEQ ID NO: 4137 - RNA, 21 nt, synthetic construct
  source 1..21: mol_type = other RNA
cccttgcgtcccgcctcccct

SEQ ID NO: 4138 - RNA, 21 nt, synthetic construct
  source 1..21: mol_type = other RNA
cccttgctctctgctgtgttg

SEQ ID NO: 4139 - RNA, 21 nt, synthetic construct
  source 1..21: mol_type = other RNA
cccttgctgtgccgccggaac

SEQ ID NO: 4140 - RNA, 21 nt, synthetic construct
  source 1..21: mol_type = other RNA
cccttttccttctccttctgg

SEQ ID NO: 4141 - RNA, 21 nt, synthetic construct
  source 1..21: mol_type = other RNA
ccgaatccacaggagaacggg

SEQ ID NO: 4142 - RNA, 21 nt, synthetic construct
  source 1..21: mol_type = other RNA
ccgaattggagccgcttcaac

SEQ ID NO: 4143 - RNA, 21 nt, synthetic construct
  source 1..21: mol_type = other RNA
ccgacggatgtctcccttgcg

SEQ ID NO: 4144 - RNA, 21 nt, synthetic construct
  source 1..21: mol_type = other RNA
ccgagaaggaagtgctccgga

SEQ ID NO: 4145 - RNA, 21 nt, synthetic construct
  source 1..21: mol_type = other RNA
ccgagtgcccttgctgtgccg

SEQ ID NO: 4146 - RNA, 21 nt, synthetic construct
  source 1..21: mol_type = other RNA
ccgatgttgagcccctccagc

SEQ ID NO: 4147 - RNA, 21 nt, synthetic construct
  source 1..21: mol_type = other RNA
ccgcattggagtcgctttaac

SEQ ID NO: 4148 - RNA, 21 nt, synthetic construct
  source 1..21: mol_type = other RNA
ccgccggaactctgccctcta

SEQ ID NO: 4149 - RNA, 21 nt, synthetic construct
  source 1..21: mol_type = other RNA
ccgcctccccttcttgtaggc

SEQ ID NO: 4150 - RNA, 21 nt, synthetic construct
  source 1..21: mol_type = other RNA
ccgcctccttcaggttccgtc

SEQ ID NO: 4151 - RNA, 21 nt, synthetic construct
  source 1..21: mol_type = other RNA
ccgcctctggcccactgtttc

SEQ ID NO: 4152 - RNA, 21 nt, synthetic construct
  source 1..21: mol_type = other RNA
ccgctcagaggacatcacgtg

SEQ ID NO: 4153 - RNA, 21 nt, synthetic construct
  source 1..21: mol_type = other RNA
ccgcttcaactggccctgggc

SEQ ID NO: 4154 - RNA, 21 nt, synthetic construct
  source 1..21: mol_type = other RNA
ccgctttctgtctgcagcttg

SEQ ID NO: 4155 - RNA, 21 nt, synthetic construct
  source 1..21: mol_type = other RNA
ccggaaagagcatccttgggc

SEQ ID NO: 4156 - RNA, 21 nt, synthetic construct
  source 1..21: mol_type = other RNA
ccggaactctgccctctaacg

SEQ ID NO: 4157 - RNA, 21 nt, synthetic construct
  source 1..21: mol_type = other RNA
ccggaccactttgagctctac

SEQ ID NO: 4158 - RNA, 21 nt, synthetic construct
  source 1..21: mol_type = other RNA
ccggactcaggagagagacgg

SEQ ID NO: 4159 - RNA, 21 nt, synthetic construct
  source 1..21: mol_type = other RNA
ccggagaggacccagacacgg

SEQ ID NO: 4160 - RNA, 21 nt, synthetic construct
  source 1..21: mol_type = other RNA
ccggagcacttccttctcggc

SEQ ID NO: 4161 - RNA, 21 nt, synthetic construct
  source 1..21: mol_type = other RNA
ccggcggcacagcaagggcac

SEQ ID NO: 4162 - RNA, 21 nt, synthetic construct
  source 1..21: mol_type = other RNA
ccggctggaggggctcaacat

SEQ ID NO: 4163 - RNA, 21 nt, synthetic construct
  source 1..21: mol_type = other RNA
ccgggcatctctcctccctca

SEQ ID NO: 4164 - RNA, 21 nt, synthetic construct
  source 1..21: mol_type = other RNA
ccggtcctggactttgtctcc

SEQ ID NO: 4165 - RNA, 21 nt, synthetic construct
  source 1..21: mol_type = other RNA
ccgtagaggtgacccaggcca

SEQ ID NO: 4166 - RNA, 21 nt, synthetic construct
  source 1..21: mol_type = other RNA
ccgtcccagtcccccttacca

SEQ ID NO: 4167 - RNA, 21 nt, synthetic construct
  source 1..21: mol_type = other RNA
ccgtcggagaaggccatccta

SEQ ID NO: 4168 - RNA, 21 nt, synthetic construct
  source 1..21: mol_type = other RNA
ccgtcgttcctggccctgggc

SEQ ID NO: 4169 - RNA, 21 nt, synthetic construct
  source 1..21: mol_type = other RNA
ccgtctccctggctttagcca

SEQ ID NO: 4170 - RNA, 21 nt, synthetic construct
  source 1..21: mol_type = other RNA
ccgtctctctcctgagtccgg

SEQ ID NO: 4171 - RNA, 21 nt, synthetic construct
  source 1..21: mol_type = other RNA
ccgtcttcactcgctgggttc

SEQ ID NO: 4172 - RNA, 21 nt, synthetic construct
  source 1..21: mol_type = other RNA
ccgtcttcctccactccctct

SEQ ID NO: 4173 - RNA, 21 nt, synthetic construct
  source 1..21: mol_type = other RNA
ccgtgtctgggtcctctccgg

SEQ ID NO: 4174 - RNA, 21 nt, synthetic construct
  source 1..21: mol_type = other RNA
ccgttctcctgtggattcggg

SEQ ID NO: 4175 - RNA, 21 nt, synthetic construct
  source 1..21: mol_type = other RNA
ccgtttttctggacaacccca

SEQ ID NO: 4176 - RNA, 21 nt, synthetic construct
  source 1..21: mol_type = other RNA
cctaagaaacgagagatggca

SEQ ID NO: 4177 - RNA, 21 nt, synthetic construct
  source 1..21: mol_type = other RNA
cctacaagaaggggaggcggg

SEQ ID NO: 4178 - RNA, 21 nt, synthetic construct
  source 1..21: mol_type = other RNA
cctaccccccttacctctcta

SEQ ID NO: 4179 - RNA, 21 nt, synthetic construct
  source 1..21: mol_type = other RNA
cctactctcttccgcattgga

SEQ ID NO: 4180 - RNA, 21 nt, synthetic construct
  source 1..21: mol_type = other RNA
cctatgctgacaccccgtccc

SEQ ID NO: 4181 - RNA, 21 nt, synthetic construct
  source 1..21: mol_type = other RNA
cctcacccaaccccatgccgt

SEQ ID NO: 4182 - RNA, 21 nt, synthetic construct
  source 1..21: mol_type = other RNA
cctccactccctcttcccctt

SEQ ID NO: 4183 - RNA, 21 nt, synthetic construct
  source 1..21: mol_type = other RNA
cctccagccggtcctggactt

SEQ ID NO: 4184 - RNA, 21 nt, synthetic construct
  source 1..21: mol_type = other RNA
cctccccgtgtctgggtcctc

SEQ ID NO: 4185 - RNA, 21 nt, synthetic construct
  source 1..21: mol_type = other RNA
cctccccttcttgtaggcctg

SEQ ID NO: 4186 - RNA, 21 nt, synthetic construct
  source 1..21: mol_type = other RNA
cctccctcacccaaccccatg

SEQ ID NO: 4187 - RNA, 21 nt, synthetic construct
  source 1..21: mol_type = other RNA
cctccctcgacttcccctctt

SEQ ID NO: 4188 - RNA, 21 nt, synthetic construct
  source 1..21: mol_type = other RNA
cctcctctcgcccccgagtgc

SEQ ID NO: 4189 - RNA, 21 nt, synthetic construct
  source 1..21: mol_type = other RNA
cctccttaccatccctccctc

SEQ ID NO: 4190 - RNA, 21 nt, synthetic construct
  source 1..21: mol_type = other RNA
cctccttaccattccccttcg

SEQ ID NO: 4191 - RNA, 21 nt, synthetic construct
  source 1..21: mol_type = other RNA
cctccttcaggttccgtcttc

SEQ ID NO: 4192 - RNA, 21 nt, synthetic construct
  source 1..21: mol_type = other RNA
cctcgacttcccctcttccga

SEQ ID NO: 4193 - RNA, 21 nt, synthetic construct
  source 1..21: mol_type = other RNA
cctctaacgctgccgtctctc

SEQ ID NO: 4194 - RNA, 21 nt, synthetic construct
  source 1..21: mol_type = other RNA
cctctacggctggcccagatc

SEQ ID NO: 4195 - RNA, 21 nt, synthetic construct
  source 1..21: mol_type = other RNA
cctctcactcctttcatttgg

SEQ ID NO: 4196 - RNA, 21 nt, synthetic construct
  source 1..21: mol_type = other RNA
cctctccatcctcttgctttc

SEQ ID NO: 4197 - RNA, 21 nt, synthetic construct
  source 1..21: mol_type = other RNA
cctctccgggcatctctcctc

SEQ ID NO: 4198 - RNA, 21 nt, synthetic construct
  source 1..21: mol_type = other RNA
cctctcctgaacctgagccag

SEQ ID NO: 4199 - RNA, 21 nt, synthetic construct
  source 1..21: mol_type = other RNA
cctctcgcccccgagtgccct

SEQ ID NO: 4200 - RNA, 21 nt, synthetic construct
  source 1..21: mol_type = other RNA
cctctgagcggatcctccccg

SEQ ID NO: 4201 - RNA, 21 nt, synthetic construct
  source 1..21: mol_type = other RNA
cctctggcccactgtttcccc

SEQ ID NO: 4202 - RNA, 21 nt, synthetic construct
  source 1..21: mol_type = other RNA
cctcttccccttgctctctgc

SEQ ID NO: 4203 - RNA, 21 nt, synthetic construct
  source 1..21: mol_type = other RNA
cctcttccgatgttgagcccc

SEQ ID NO: 4204 - RNA, 21 nt, synthetic construct
  source 1..21: mol_type = other RNA
cctcttgctttctttgcctgg

SEQ ID NO: 4205 - RNA, 21 nt, synthetic construct
  source 1..21: mol_type = other RNA
cctgaacctgagccagctccc

SEQ ID NO: 4206 - RNA, 21 nt, synthetic construct
  source 1..21: mol_type = other RNA
cctgaaggaggcggcagggaa

SEQ ID NO: 4207 - RNA, 21 nt, synthetic construct
  source 1..21: mol_type = other RNA
cctgagccagctcccatagct

SEQ ID NO: 4208 - RNA, 21 nt, synthetic construct
  source 1..21: mol_type = other RNA
cctgagtccggaccactttga

SEQ ID NO: 4209 - RNA, 21 nt, synthetic construct
  source 1..21: mol_type = other RNA
cctgcatcatcaccgtttttc

SEQ ID NO: 4210 - RNA, 21 nt, synthetic construct
  source 1..21: mol_type = other RNA
cctgcattctctcccctgggc

SEQ ID NO: 4211 - RNA, 21 nt, synthetic construct
  source 1..21: mol_type = other RNA
cctgccctctcctgaacctga

SEQ ID NO: 4212 - RNA, 21 nt, synthetic construct
  source 1..21: mol_type = other RNA
cctgccctgccctctcctgaa

SEQ ID NO: 4213 - RNA, 21 nt, synthetic construct
  source 1..21: mol_type = other RNA
cctgccgcctccttcaggttc

SEQ ID NO: 4214 - RNA, 21 nt, synthetic construct
  source 1..21: mol_type = other RNA
cctgcctgggaaggggaaaca

SEQ ID NO: 4215 - RNA, 21 nt, synthetic construct
  source 1..21: mol_type = other RNA
cctgctttctctgacctgcat

SEQ ID NO: 4216 - RNA, 21 nt, synthetic construct
  source 1..21: mol_type = other RNA
cctggacaccccgttctcctg

SEQ ID NO: 4217 - RNA, 21 nt, synthetic construct
  source 1..21: mol_type = other RNA
cctggactttgtctccttccc

SEQ ID NO: 4218 - RNA, 21 nt, synthetic construct
  source 1..21: mol_type = other RNA
cctggccattgtcactttgcg

SEQ ID NO: 4219 - RNA, 21 nt, synthetic construct
  source 1..21: mol_type = other RNA
cctggccctggccattgtcac

SEQ ID NO: 4220 - RNA, 21 nt, synthetic construct
  source 1..21: mol_type = other RNA
cctggccctgggctttgccac

SEQ ID NO: 4221 - RNA, 21 nt, synthetic construct
  source 1..21: mol_type = other RNA
cctggctttagccacctctcc

SEQ ID NO: 4222 - RNA, 21 nt, synthetic construct
  source 1..21: mol_type = other RNA
cctggctttggcagcctgtgc

SEQ ID NO: 4223 - RNA, 21 nt, synthetic construct
  source 1..21: mol_type = other RNA
cctgggaaggggaaacagtgg

SEQ ID NO: 4224 - RNA, 21 nt, synthetic construct
  source 1..21: mol_type = other RNA
cctgggcctgtgccgctttct

SEQ ID NO: 4225 - RNA, 21 nt, synthetic construct
  source 1..21: mol_type = other RNA
cctgggcttagccactctgtg

SEQ ID NO: 4226 - RNA, 21 nt, synthetic construct
  source 1..21: mol_type = other RNA
cctgggctttgccaccctatg

SEQ ID NO: 4227 - RNA, 21 nt, synthetic construct
  source 1..21: mol_type = other RNA
cctggggcagagtggtcagca

SEQ ID NO: 4228 - RNA, 21 nt, synthetic construct
  source 1..21: mol_type = other RNA
cctgggtcacctctacggctg

SEQ ID NO: 4229 - RNA, 21 nt, synthetic construct
  source 1..21: mol_type = other RNA
cctgtgccatctctcgtttct

SEQ ID NO: 4230 - RNA, 21 nt, synthetic construct
  source 1..21: mol_type = other RNA
cctgtgccgctttctgtctgc

SEQ ID NO: 4231 - RNA, 21 nt, synthetic construct
  source 1..21: mol_type = other RNA
cctgtgctgacccatgcagtc

SEQ ID NO: 4232 - RNA, 21 nt, synthetic construct
  source 1..21: mol_type = other RNA
cctgtggattcgggtcacctc

SEQ ID NO: 4233 - RNA, 21 nt, synthetic construct
  source 1..21: mol_type = other RNA
ccttaccatccctccctcgac

SEQ ID NO: 4234 - RNA, 21 nt, synthetic construct
  source 1..21: mol_type = other RNA
ccttaccattccccttcgacc

SEQ ID NO: 4235 - RNA, 21 nt, synthetic construct
  source 1..21: mol_type = other RNA
ccttcaggttccgtcttcctc

SEQ ID NO: 4236 - RNA, 21 nt, synthetic construct
  source 1..21: mol_type = other RNA
ccttcccaggcaggtcctgct

SEQ ID NO: 4237 - RNA, 21 nt, synthetic construct
  source 1..21: mol_type = other RNA
ccttccctgccctgccctctc

SEQ ID NO: 4238 - RNA, 21 nt, synthetic construct
  source 1..21: mol_type = other RNA
ccttccctgccgcctccttca

SEQ ID NO: 4239 - RNA, 21 nt, synthetic construct
  source 1..21: mol_type = other RNA
ccttcgaccaccccacttccg

SEQ ID NO: 4240 - RNA, 21 nt, synthetic construct
  source 1..21: mol_type = other RNA
ccttcgacctactctcttccg

SEQ ID NO: 4241 - RNA, 21 nt, synthetic construct
  source 1..21: mol_type = other RNA
ccttctccgacggatgtctcc

SEQ ID NO: 4242 - RNA, 21 nt, synthetic construct
  source 1..21: mol_type = other RNA
ccttctccttctggggcctgt

SEQ ID NO: 4243 - RNA, 21 nt, synthetic construct
  source 1..21: mol_type = other RNA
ccttctcggcgctgcaccacg

SEQ ID NO: 4244 - RNA, 21 nt, synthetic construct
  source 1..21: mol_type = other RNA
ccttctggggcctgtgccatc

SEQ ID NO: 4245 - RNA, 21 nt, synthetic construct
  source 1..21: mol_type = other RNA
ccttcttgtaggcctgcatca

SEQ ID NO: 4246 - RNA, 21 nt, synthetic construct
  source 1..21: mol_type = other RNA
ccttgcgtcccgcctcccctt

SEQ ID NO: 4247 - RNA, 21 nt, synthetic construct
  source 1..21: mol_type = other RNA
ccttgctctctgctgtgttgc

SEQ ID NO: 4248 - RNA, 21 nt, synthetic construct
  source 1..21: mol_type = other RNA
ccttgctgtgccgccggaact

SEQ ID NO: 4249 - RNA, 21 nt, synthetic construct
  source 1..21: mol_type = other RNA
ccttgggcagcaacacagcag

SEQ ID NO: 4250 - RNA, 21 nt, synthetic construct
  source 1..21: mol_type = other RNA
cctttcatttgggcagctccc

SEQ ID NO: 4251 - RNA, 21 nt, synthetic construct
  source 1..21: mol_type = other RNA
ccttttccttctccttctggg

SEQ ID NO: 4252 - RNA, 21 nt, synthetic construct
  source 1..21: mol_type = other RNA
cgaaggggaatggtaaggagg

SEQ ID NO: 4253 - RNA, 21 nt, synthetic construct
  source 1..21: mol_type = other RNA
cgaaggggaatggtaaggggg

SEQ ID NO: 4254 - RNA, 21 nt, synthetic construct
  source 1..21: mol_type = other RNA
cgaatccacaggagaacgggg

SEQ ID NO: 4255 - RNA, 21 nt, synthetic construct
  source 1..21: mol_type = other RNA
cgaattggagccgcttcaact

SEQ ID NO: 4256 - RNA, 21 nt, synthetic construct
  source 1..21: mol_type = other RNA
cgaccaccccacttccgaatt

SEQ ID NO: 4257 - RNA, 21 nt, synthetic construct
  source 1..21: mol_type = other RNA
cgacctactctcttccgcatt

SEQ ID NO: 4258 - RNA, 21 nt, synthetic construct
  source 1..21: mol_type = other RNA
cgacggatgtctcccttgcgt

SEQ ID NO: 4259 - RNA, 21 nt, synthetic construct
  source 1..21: mol_type = other RNA
cgactccaatgcggaagagag

SEQ ID NO: 4260 - RNA, 21 nt, synthetic construct
  source 1..21: mol_type = other RNA
cgacttcccctcttccgatgt

SEQ ID NO: 4261 - RNA, 21 nt, synthetic construct
  source 1..21: mol_type = other RNA
cgagaaggaagtgctccggaa

SEQ ID NO: 4262 - RNA, 21 nt, synthetic construct
  source 1..21: mol_type = other RNA
cgagagatggcacaggcccca

SEQ ID NO: 4263 - RNA, 21 nt, synthetic construct
  source 1..21: mol_type = other RNA
cgagaggagggcagcgcaaag

SEQ ID NO: 4264 - RNA, 21 nt, synthetic construct
  source 1..21: mol_type = other RNA
cgagggagggatggtaaggag

SEQ ID NO: 4265 - RNA, 21 nt, synthetic construct
  source 1..21: mol_type = other RNA
cgagtgaagacggcatggggt

SEQ ID NO: 4266 - RNA, 21 nt, synthetic construct
  source 1..21: mol_type = other RNA
cgagtgcccttgctgtgccgc

SEQ ID NO: 4267 - RNA, 21 nt, synthetic construct
  source 1..21: mol_type = other RNA
cgatgttgagcccctccagcc

SEQ ID NO: 4268 - RNA, 21 nt, synthetic construct
  source 1..21: mol_type = other RNA
cgcaaagtgacaatggccagg

SEQ ID NO: 4269 - RNA, 21 nt, synthetic construct
  source 1..21: mol_type = other RNA
cgcaagggagacatccgtcgg

SEQ ID NO: 4270 - RNA, 21 nt, synthetic construct
  source 1..21: mol_type = other RNA
cgcagaagccagtagagctca

SEQ ID NO: 4271 - RNA, 21 nt, synthetic construct
  source 1..21: mol_type = other RNA
cgcattggagtcgctttaact

SEQ ID NO: 4272 - RNA, 21 nt, synthetic construct
  source 1..21: mol_type = other RNA
cgcccccgagtgcccttgctg

SEQ ID NO: 4273 - RNA, 21 nt, synthetic construct
  source 1..21: mol_type = other RNA
cgccccgtcgttcctggccct

SEQ ID NO: 4274 - RNA, 21 nt, synthetic construct
  source 1..21: mol_type = other RNA
cgccgagaaggaagtgctccg

SEQ ID NO: 4275 - RNA, 21 nt, synthetic construct
  source 1..21: mol_type = other RNA
cgccgcctctggcccactgtt

SEQ ID NO: 4276 - RNA, 21 nt, synthetic construct
  source 1..21: mol_type = other RNA
cgccggaactctgccctctaa

SEQ ID NO: 4277 - RNA, 21 nt, synthetic construct
  source 1..21: mol_type = other RNA
cgcctccccttcttgtaggcc

SEQ ID NO: 4278 - RNA, 21 nt, synthetic construct
  source 1..21: mol_type = other RNA
cgcctccttcaggttccgtct

SEQ ID NO: 4279 - RNA, 21 nt, synthetic construct
  source 1..21: mol_type = other RNA
cgcctctggcccactgtttcc

SEQ ID NO: 4280 - RNA, 21 nt, synthetic construct
  source 1..21: mol_type = other RNA
cgctcagaggacatcacgtgg

SEQ ID NO: 4281 - RNA, 21 nt, synthetic construct
  source 1..21: mol_type = other RNA
cgctgcaccacgtgatgtcct

SEQ ID NO: 4282 - RNA, 21 nt, synthetic construct
  source 1..21: mol_type = other RNA
cgctgccctcctctcgccccc

SEQ ID NO: 4283 - RNA, 21 nt, synthetic construct
  source 1..21: mol_type = other RNA
cgctgccgtctctctcctgag

SEQ ID NO: 4284 - RNA, 21 nt, synthetic construct
  source 1..21: mol_type = other RNA
cgctgggttcccttttccttc

SEQ ID NO: 4285 - RNA, 21 nt, synthetic construct
  source 1..21: mol_type = other RNA
cgcttcaactggccctgggct

SEQ ID NO: 4286 - RNA, 21 nt, synthetic construct
  source 1..21: mol_type = other RNA
cgctttaactggccctggctt

SEQ ID NO: 4287 - RNA, 21 nt, synthetic construct
  source 1..21: mol_type = other RNA
cgctttctgtctgcagcttgt

SEQ ID NO: 4288 - RNA, 21 nt, synthetic construct
  source 1..21: mol_type = other RNA
cggaaagagcatccttgggca

SEQ ID NO: 4289 - RNA, 21 nt, synthetic construct
  source 1..21: mol_type = other RNA
cggaacctgaaggaggcggca

SEQ ID NO: 4290 - RNA, 21 nt, synthetic construct
  source 1..21: mol_type = other RNA
cggaactctgccctctaacgc

SEQ ID NO: 4291 - RNA, 21 nt, synthetic construct
  source 1..21: mol_type = other RNA
cggaagagagtaggtcgaagg

SEQ ID NO: 4292 - RNA, 21 nt, synthetic construct
  source 1..21: mol_type = other RNA
cggaagaggggaagtcgaggg

SEQ ID NO: 4293 - RNA, 21 nt, synthetic construct
  source 1..21: mol_type = other RNA
cggaagtggggtggtcgaagg

SEQ ID NO: 4294 - RNA, 21 nt, synthetic construct
  source 1..21: mol_type = other RNA
cggaccactttgagctctact

SEQ ID NO: 4295 - RNA, 21 nt, synthetic construct
  source 1..21: mol_type = other RNA
cggactcaggagagagacggc

SEQ ID NO: 4296 - RNA, 21 nt, synthetic construct
  source 1..21: mol_type = other RNA
cggagaaggccatcctaagaa

SEQ ID NO: 4297 - RNA, 21 nt, synthetic construct
  source 1..21: mol_type = other RNA
cggagaggacccagacacggg

SEQ ID NO: 4298 - RNA, 21 nt, synthetic construct
  source 1..21: mol_type = other RNA
cggagcacttccttctcggcg

SEQ ID NO: 4299 - RNA, 21 nt, synthetic construct
  source 1..21: mol_type = other RNA
cggatcctccccgtgtctggg

SEQ ID NO: 4300 - RNA, 21 nt, synthetic construct
  source 1..21: mol_type = other RNA
cggatgtctcccttgcgtccc

SEQ ID NO: 4301 - RNA, 21 nt, synthetic construct
  source 1..21: mol_type = other RNA
cggcacagcaagggcactcgg

SEQ ID NO: 4302 - RNA, 21 nt, synthetic construct
  source 1..21: mol_type = other RNA
cggcacaggcccaggggagag

SEQ ID NO: 4303 - RNA, 21 nt, synthetic construct
  source 1..21: mol_type = other RNA
cggcagcgttagagggcagag

SEQ ID NO: 4304 - RNA, 21 nt, synthetic construct
  source 1..21: mol_type = other RNA
cggcagggaaggatctgggcc

SEQ ID NO: 4305 - RNA, 21 nt, synthetic construct
  source 1..21: mol_type = other RNA
cggcatggggttgggtgaggg

SEQ ID NO: 4306 - RNA, 21 nt, synthetic construct
  source 1..21: mol_type = other RNA
cggcgcagaagccagtagagc

SEQ ID NO: 4307 - RNA, 21 nt, synthetic construct
  source 1..21: mol_type = other RNA
cggcgctgcaccacgtgatgt

SEQ ID NO: 4308 - RNA, 21 nt, synthetic construct
  source 1..21: mol_type = other RNA
cggcggcacagcaagggcact

SEQ ID NO: 4309 - RNA, 21 nt, synthetic construct
  source 1..21: mol_type = other RNA
cggctccaattcggaagtggg

SEQ ID NO: 4310 - RNA, 21 nt, synthetic construct
  source 1..21: mol_type = other RNA
cggctggaggggctcaacatc

SEQ ID NO: 4311 - RNA, 21 nt, synthetic construct
  source 1..21: mol_type = other RNA
cggctggcccagatccttccc

SEQ ID NO: 4312 - RNA, 21 nt, synthetic construct
  source 1..21: mol_type = other RNA
cgggacgcaagggagacatcc

SEQ ID NO: 4313 - RNA, 21 nt, synthetic construct
  source 1..21: mol_type = other RNA
cgggcatctctcctccctcac

SEQ ID NO: 4314 - RNA, 21 nt, synthetic construct
  source 1..21: mol_type = other RNA
cggggaggatccgctcagagg

SEQ ID NO: 4315 - RNA, 21 nt, synthetic construct
  source 1..21: mol_type = other RNA
cgggggcgagaggagggcagc

SEQ ID NO: 4316 - RNA, 21 nt, synthetic construct
  source 1..21: mol_type = other RNA
cggggtactttggggttgtcc

SEQ ID NO: 4317 - RNA, 21 nt, synthetic construct
  source 1..21: mol_type = other RNA
cggggtgtcagcatagggtgg

SEQ ID NO: 4318 - RNA, 21 nt, synthetic construct
  source 1..21: mol_type = other RNA
cggggtgtccaggcaaagaaa

SEQ ID NO: 4319 - RNA, 21 nt, synthetic construct
  source 1..21: mol_type = other RNA
cgggtcacctctcactccttt

SEQ ID NO: 4320 - RNA, 21 nt, synthetic construct
  source 1..21: mol_type = other RNA
cggtcctggactttgtctcct

SEQ ID NO: 4321 - RNA, 21 nt, synthetic construct
  source 1..21: mol_type = other RNA
cggtgatgatgcaggcctaca

SEQ ID NO: 4322 - RNA, 21 nt, synthetic construct
  source 1..21: mol_type = other RNA
cgtagaggtgacccaggccac

SEQ ID NO: 4323 - RNA, 21 nt, synthetic construct
  source 1..21: mol_type = other RNA
cgtcccagtcccccttaccat

SEQ ID NO: 4324 - RNA, 21 nt, synthetic construct
  source 1..21: mol_type = other RNA
cgtcccgcctccccttcttgt

SEQ ID NO: 4325 - RNA, 21 nt, synthetic construct
  source 1..21: mol_type = other RNA
cgtcggagaaggccatcctaa

SEQ ID NO: 4326 - RNA, 21 nt, synthetic construct
  source 1..21: mol_type = other RNA
cgtcgttcctggccctgggct

SEQ ID NO: 4327 - RNA, 21 nt, synthetic construct
  source 1..21: mol_type = other RNA
cgtctccctggctttagccac

SEQ ID NO: 4328 - RNA, 21 nt, synthetic construct
  source 1..21: mol_type = other RNA
cgtctctctcctgagtccgga

SEQ ID NO: 4329 - RNA, 21 nt, synthetic construct
  source 1..21: mol_type = other RNA
cgtcttcactcgctgggttcc

SEQ ID NO: 4330 - RNA, 21 nt, synthetic construct
  source 1..21: mol_type = other RNA
cgtcttcctccactccctctt

SEQ ID NO: 4331 - RNA, 21 nt, synthetic construct
  source 1..21: mol_type = other RNA
cgtgatgtcctctgagcggat

SEQ ID NO: 4332 - RNA, 21 nt, synthetic construct
  source 1..21: mol_type = other RNA
cgtggtgcagcgccgagaagg

SEQ ID NO: 4333 - RNA, 21 nt, synthetic construct
  source 1..21: mol_type = other RNA
cgtgtctgggtcctctccggg

SEQ ID NO: 4334 - RNA, 21 nt, synthetic construct
  source 1..21: mol_type = other RNA
cgttagagggcagagttccgg

SEQ ID NO: 4335 - RNA, 21 nt, synthetic construct
  source 1..21: mol_type = other RNA
cgttcctggccctgggctttg

SEQ ID NO: 4336 - RNA, 21 nt, synthetic construct
  source 1..21: mol_type = other RNA
cgttctcctgtggattcgggt

SEQ ID NO: 4337 - RNA, 21 nt, synthetic construct
  source 1..21: mol_type = other RNA
cgtttcttaggatggccttct

SEQ ID NO: 4338 - RNA, 21 nt, synthetic construct
  source 1..21: mol_type = other RNA
cgtttttctggacaaccccaa

SEQ ID NO: 4339 - RNA, 21 nt, synthetic construct
  source 1..21: mol_type = other RNA
ctaaagccagggagacggggt

SEQ ID NO: 4340 - RNA, 21 nt, synthetic construct
  source 1..21: mol_type = other RNA
ctaacgctgccgtctctctcc

SEQ ID NO: 4341 - RNA, 21 nt, synthetic construct
  source 1..21: mol_type = other RNA
ctaagaaacgagagatggcac

SEQ ID NO: 4342 - RNA, 21 nt, synthetic construct
  source 1..21: mol_type = other RNA
ctaagcccagggccagttgaa

SEQ ID NO: 4343 - RNA, 21 nt, synthetic construct
  source 1..21: mol_type = other RNA
ctacaagaaggggaggcggga

SEQ ID NO: 4344 - RNA, 21 nt, synthetic construct
  source 1..21: mol_type = other RNA
ctaccccccttacctctctag

SEQ ID NO: 4345 - RNA, 21 nt, synthetic construct
  source 1..21: mol_type = other RNA
ctacggctggcccagatcctt

SEQ ID NO: 4346 - RNA, 21 nt, synthetic construct
  source 1..21: mol_type = other RNA
ctactctcttccgcattggag

SEQ ID NO: 4347 - RNA, 21 nt, synthetic construct
  source 1..21: mol_type = other RNA
ctactggcttctgcgccgcct

SEQ ID NO: 4348 - RNA, 21 nt, synthetic construct
  source 1..21: mol_type = other RNA
ctagagaggtaaggggggtag

SEQ ID NO: 4349 - RNA, 21 nt, synthetic construct
  source 1..21: mol_type = other RNA
ctagcacagactagagaggta

SEQ ID NO: 4350 - RNA, 21 nt, synthetic construct
  source 1..21: mol_type = other RNA
ctatctgcctggccctggcca

SEQ ID NO: 4351 - RNA, 21 nt, synthetic construct
  source 1..21: mol_type = other RNA
ctatgctgacaccccgtccca

SEQ ID NO: 4352 - RNA, 21 nt, synthetic construct
  source 1..21: mol_type = other RNA
ctatgggagctggctcaggtt

SEQ ID NO: 4353 - RNA, 21 nt, synthetic construct
  source 1..21: mol_type = other RNA
ctcaaagtggtccggactcag

SEQ ID NO: 4354 - RNA, 21 nt, synthetic construct
  source 1..21: mol_type = other RNA
ctcaacatcggaagaggggaa

SEQ ID NO: 4355 - RNA, 21 nt, synthetic construct
  source 1..21: mol_type = other RNA
ctcacccaaccccatgccgtc

SEQ ID NO: 4356 - RNA, 21 nt, synthetic construct
  source 1..21: mol_type = other RNA
ctcactcctttcatttgggca

SEQ ID NO: 4357 - RNA, 21 nt, synthetic construct
  source 1..21: mol_type = other RNA
ctcagaggacatcacgtggtg

SEQ ID NO: 4358 - RNA, 21 nt, synthetic construct
  source 1..21: mol_type = other RNA
ctcaggagagagacggcagcg

SEQ ID NO: 4359 - RNA, 21 nt, synthetic construct
  source 1..21: mol_type = other RNA
ctcaggttcaggagagggcag

SEQ ID NO: 4360 - RNA, 21 nt, synthetic construct
  source 1..21: mol_type = other RNA
ctcagtctggtctatctgcct

SEQ ID NO: 4361 - RNA, 21 nt, synthetic construct
  source 1..21: mol_type = other RNA
ctccaatgcggaagagagtag

SEQ ID NO: 4362 - RNA, 21 nt, synthetic construct
  source 1..21: mol_type = other RNA
ctccaattcggaagtggggtg

SEQ ID NO: 4363 - RNA, 21 nt, synthetic construct
  source 1..21: mol_type = other RNA
ctccactccctcttccccttg

SEQ ID NO: 4364 - RNA, 21 nt, synthetic construct
  source 1..21: mol_type = other RNA
ctccagccggtcctggacttt

SEQ ID NO: 4365 - RNA, 21 nt, synthetic construct
  source 1..21: mol_type = other RNA
ctccatcctcttgctttcttt

SEQ ID NO: 4366 - RNA, 21 nt, synthetic construct
  source 1..21: mol_type = other RNA
ctcccatagctcagtctggtc

SEQ ID NO: 4367 - RNA, 21 nt, synthetic construct
  source 1..21: mol_type = other RNA
ctccccgtgtctgggtcctct

SEQ ID NO: 4368 - RNA, 21 nt, synthetic construct
  source 1..21: mol_type = other RNA
ctcccctaccccccttacctc

SEQ ID NO: 4369 - RNA, 21 nt, synthetic construct
  source 1..21: mol_type = other RNA
ctcccctgggcctgtgccgct

SEQ ID NO: 4370 - RNA, 21 nt, synthetic construct
  source 1..21: mol_type = other RNA
ctccccttcttgtaggcctgc

SEQ ID NO: 4371 - RNA, 21 nt, synthetic construct
  source 1..21: mol_type = other RNA
ctccctcacccaaccccatgc

SEQ ID NO: 4372 - RNA, 21 nt, synthetic construct
  source 1..21: mol_type = other RNA
ctccctcgacttcccctcttc

SEQ ID NO: 4373 - RNA, 21 nt, synthetic construct
  source 1..21: mol_type = other RNA
ctccctcttccccttgctctc

SEQ ID NO: 4374 - RNA, 21 nt, synthetic construct
  source 1..21: mol_type = other RNA
ctccctggctttagccacctc

SEQ ID NO: 4375 - RNA, 21 nt, synthetic construct
  source 1..21: mol_type = other RNA
ctcccttgcgtcccgcctccc

SEQ ID NO: 4376 - RNA, 21 nt, synthetic construct
  source 1..21: mol_type = other RNA
ctccgacggatgtctcccttg

SEQ ID NO: 4377 - RNA, 21 nt, synthetic construct
  source 1..21: mol_type = other RNA
ctccggaaagagcatccttgg

SEQ ID NO: 4378 - RNA, 21 nt, synthetic construct
  source 1..21: mol_type = other RNA
ctccgggcatctctcctccct

SEQ ID NO: 4379 - RNA, 21 nt, synthetic construct
  source 1..21: mol_type = other RNA
ctcctccctcacccaacccca

SEQ ID NO: 4380 - RNA, 21 nt, synthetic construct
  source 1..21: mol_type = other RNA
ctcctctcgcccccgagtgcc

SEQ ID NO: 4381 - RNA, 21 nt, synthetic construct
  source 1..21: mol_type = other RNA
ctcctgaacctgagccagctc

SEQ ID NO: 4382 - RNA, 21 nt, synthetic construct
  source 1..21: mol_type = other RNA
ctcctgagtccggaccacttt

SEQ ID NO: 4383 - RNA, 21 nt, synthetic construct
  source 1..21: mol_type = other RNA
ctcctgtggattcgggtcacc

SEQ ID NO: 4384 - RNA, 21 nt, synthetic construct
  source 1..21: mol_type = other RNA
ctccttaccatccctccctcg

SEQ ID NO: 4385 - RNA, 21 nt, synthetic construct
  source 1..21: mol_type = other RNA
ctccttaccattccccttcga

SEQ ID NO: 4386 - RNA, 21 nt, synthetic construct
  source 1..21: mol_type = other RNA
ctccttcaggttccgtcttcc

SEQ ID NO: 4387 - RNA, 21 nt, synthetic construct
  source 1..21: mol_type = other RNA
ctccttccctgccctgccctc

SEQ ID NO: 4388 - RNA, 21 nt, synthetic construct
  source 1..21: mol_type = other RNA
ctccttctggggcctgtgcca

SEQ ID NO: 4389 - RNA, 21 nt, synthetic construct
  source 1..21: mol_type = other RNA
ctcctttcatttgggcagctc

SEQ ID NO: 4390 - RNA, 21 nt, synthetic construct
  source 1..21: mol_type = other RNA
ctcgacttcccctcttccgat

SEQ ID NO: 4391 - RNA, 21 nt, synthetic construct
  source 1..21: mol_type = other RNA
ctcgcccccgagtgcccttgc

SEQ ID NO: 4392 - RNA, 21 nt, synthetic construct
  source 1..21: mol_type = other RNA
ctcgctgggttcccttttcct

SEQ ID NO: 4393 - RNA, 21 nt, synthetic construct
  source 1..21: mol_type = other RNA
ctcggcgctgcaccacgtgat

SEQ ID NO: 4394 - RNA, 21 nt, synthetic construct
  source 1..21: mol_type = other RNA
ctcgggggcgagaggagggca

SEQ ID NO: 4395 - RNA, 21 nt, synthetic construct
  source 1..21: mol_type = other RNA
ctcgtttcttaggatggcctt

SEQ ID NO: 4396 - RNA, 21 nt, synthetic construct
  source 1..21: mol_type = other RNA
ctctaacgctgccgtctctct

SEQ ID NO: 4397 - RNA, 21 nt, synthetic construct
  source 1..21: mol_type = other RNA
ctctacggctggcccagatcc

SEQ ID NO: 4398 - RNA, 21 nt, synthetic construct
  source 1..21: mol_type = other RNA
ctctactggcttctgcgccgc

SEQ ID NO: 4399 - RNA, 21 nt, synthetic construct
  source 1..21: mol_type = other RNA
ctctcactcctttcatttggg

SEQ ID NO: 4400 - RNA, 21 nt, synthetic construct
  source 1..21: mol_type = other RNA
ctctccatcctcttgctttct

SEQ ID NO: 4401 - RNA, 21 nt, synthetic construct
  source 1..21: mol_type = other RNA
ctctcccctgggcctgtgccg

SEQ ID NO: 4402 - RNA, 21 nt, synthetic construct
  source 1..21: mol_type = other RNA
ctctccgggcatctctcctcc

SEQ ID NO: 4403 - RNA, 21 nt, synthetic construct
  source 1..21: mol_type = other RNA
ctctcctccctcacccaaccc

SEQ ID NO: 4404 - RNA, 21 nt, synthetic construct
  source 1..21: mol_type = other RNA
ctctcctgaacctgagccagc

SEQ ID NO: 4405 - RNA, 21 nt, synthetic construct
  source 1..21: mol_type = other RNA
ctctcctgagtccggaccact

SEQ ID NO: 4406 - RNA, 21 nt, synthetic construct
  source 1..21: mol_type = other RNA
ctctcgcccccgagtgccctt

SEQ ID NO: 4407 - RNA, 21 nt, synthetic construct
  source 1..21: mol_type = other RNA
ctctcgtttcttaggatggcc

SEQ ID NO: 4408 - RNA, 21 nt, synthetic construct
  source 1..21: mol_type = other RNA
ctctctcctgagtccggacca

SEQ ID NO: 4409 - RNA, 21 nt, synthetic construct
  source 1..21: mol_type = other RNA
ctctctgctgtgttgctgccc

SEQ ID NO: 4410 - RNA, 21 nt, synthetic construct
  source 1..21: mol_type = other RNA
ctctcttccgcattggagtcg

SEQ ID NO: 4411 - RNA, 21 nt, synthetic construct
  source 1..21: mol_type = other RNA
ctctgacctgcattctctccc

SEQ ID NO: 4412 - RNA, 21 nt, synthetic construct
  source 1..21: mol_type = other RNA
ctctgagcggatcctccccgt

SEQ ID NO: 4413 - RNA, 21 nt, synthetic construct
  source 1..21: mol_type = other RNA
ctctgccccaggcctccttac

SEQ ID NO: 4414 - RNA, 21 nt, synthetic construct
  source 1..21: mol_type = other RNA
ctctgccctctaacgctgccg

SEQ ID NO: 4415 - RNA, 21 nt, synthetic construct
  source 1..21: mol_type = other RNA
ctctgctgtgttgctgcccaa

SEQ ID NO: 4416 - RNA, 21 nt, synthetic construct
  source 1..21: mol_type = other RNA
ctctggcccactgtttcccct

SEQ ID NO: 4417 - RNA, 21 nt, synthetic construct
  source 1..21: mol_type = other RNA
ctctgtgctgaccactctgcc

SEQ ID NO: 4418 - RNA, 21 nt, synthetic construct
  source 1..21: mol_type = other RNA
ctcttccccttgctctctgct

SEQ ID NO: 4419 - RNA, 21 nt, synthetic construct
  source 1..21: mol_type = other RNA
ctcttccgatgttgagcccct

SEQ ID NO: 4420 - RNA, 21 nt, synthetic construct
  source 1..21: mol_type = other RNA
ctcttccgcattggagtcgct

SEQ ID NO: 4421 - RNA, 21 nt, synthetic construct
  source 1..21: mol_type = other RNA
ctcttgctttctttgcctgga

SEQ ID NO: 4422 - RNA, 21 nt, synthetic construct
  source 1..21: mol_type = other RNA
ctctttccggagcacttcctt

SEQ ID NO: 4423 - RNA, 21 nt, synthetic construct
  source 1..21: mol_type = other RNA
ctgaacctgagccagctccca

SEQ ID NO: 4424 - RNA, 21 nt, synthetic construct
  source 1..21: mol_type = other RNA
ctgaaggaggcggcagggaag

SEQ ID NO: 4425 - RNA, 21 nt, synthetic construct
  source 1..21: mol_type = other RNA
ctgacaccccgtcccagtccc

SEQ ID NO: 4426 - RNA, 21 nt, synthetic construct
  source 1..21: mol_type = other RNA
ctgaccactctgccccaggcc

SEQ ID NO: 4427 - RNA, 21 nt, synthetic construct
  source 1..21: mol_type = other RNA
ctgacccatgcagtcctcctt

SEQ ID NO: 4428 - RNA, 21 nt, synthetic construct
  source 1..21: mol_type = other RNA
ctgacctgcattctctcccct

SEQ ID NO: 4429 - RNA, 21 nt, synthetic construct
  source 1..21: mol_type = other RNA
ctgagccagctcccatagctc

SEQ ID NO: 4430 - RNA, 21 nt, synthetic construct
  source 1..21: mol_type = other RNA
ctgagcggatcctccccgtgt

SEQ ID NO: 4431 - RNA, 21 nt, synthetic construct
  source 1..21: mol_type = other RNA
ctgagctatgggagctggctc

SEQ ID NO: 4432 - RNA, 21 nt, synthetic construct
  source 1..21: mol_type = other RNA
ctgagtccggaccactttgag

SEQ ID NO: 4433 - RNA, 21 nt, synthetic construct
  source 1..21: mol_type = other RNA
ctgcaccacgtgatgtcctct

SEQ ID NO: 4434 - RNA, 21 nt, synthetic construct
  source 1..21: mol_type = other RNA
ctgcagacagaaagcggcaca

SEQ ID NO: 4435 - RNA, 21 nt, synthetic construct
  source 1..21: mol_type = other RNA
ctgcagcttgtggcctgggtc

SEQ ID NO: 4436 - RNA, 21 nt, synthetic construct
  source 1..21: mol_type = other RNA
ctgcatcatcaccgtttttct

SEQ ID NO: 4437 - RNA, 21 nt, synthetic construct
  source 1..21: mol_type = other RNA
ctgcatgggtcagcacaggct

SEQ ID NO: 4438 - RNA, 21 nt, synthetic construct
  source 1..21: mol_type = other RNA
ctgcattctctcccctgggcc

SEQ ID NO: 4439 - RNA, 21 nt, synthetic construct
  source 1..21: mol_type = other RNA
ctgccaaagccagggccagtt

SEQ ID NO: 4440 - RNA, 21 nt, synthetic construct
  source 1..21: mol_type = other RNA
ctgcccaaatgaaaggagtga

SEQ ID NO: 4441 - RNA, 21 nt, synthetic construct
  source 1..21: mol_type = other RNA
ctgcccaaggatgctctttcc

SEQ ID NO: 4442 - RNA, 21 nt, synthetic construct
  source 1..21: mol_type = other RNA
ctgccccaggcctccttacca

SEQ ID NO: 4443 - RNA, 21 nt, synthetic construct
  source 1..21: mol_type = other RNA
ctgccctcctctcgcccccga

SEQ ID NO: 4444 - RNA, 21 nt, synthetic construct
  source 1..21: mol_type = other RNA
ctgccctctaacgctgccgtc

SEQ ID NO: 4445 - RNA, 21 nt, synthetic construct
  source 1..21: mol_type = other RNA
ctgccctctcctgaacctgag

SEQ ID NO: 4446 - RNA, 21 nt, synthetic construct
  source 1..21: mol_type = other RNA
ctgccctgccctctcctgaac

SEQ ID NO: 4447 - RNA, 21 nt, synthetic construct
  source 1..21: mol_type = other RNA
ctgccgcctccttcaggttcc

SEQ ID NO: 4448 - RNA, 21 nt, synthetic construct
  source 1..21: mol_type = other RNA
ctgccgtctctctcctgagtc

SEQ ID NO: 4449 - RNA, 21 nt, synthetic construct
  source 1..21: mol_type = other RNA
ctgcctggccctggccattgt

SEQ ID NO: 4450 - RNA, 21 nt, synthetic construct
  source 1..21: mol_type = other RNA
ctgcctgggaaggggaaacag

SEQ ID NO: 4451 - RNA, 21 nt, synthetic construct
  source 1..21: mol_type = other RNA
ctgcgccgcctctggcccact

SEQ ID NO: 4452 - RNA, 21 nt, synthetic construct
  source 1..21: mol_type = other RNA
ctgctgtgttgctgcccaagg

SEQ ID NO: 4453 - RNA, 21 nt, synthetic construct
  source 1..21: mol_type = other RNA
ctgctttctctgacctgcatt

SEQ ID NO: 4454 - RNA, 21 nt, synthetic construct
  source 1..21: mol_type = other RNA
ctggacaaccccaaagtaccc

SEQ ID NO: 4455 - RNA, 21 nt, synthetic construct
  source 1..21: mol_type = other RNA
ctggacaccccgttctcctgt

SEQ ID NO: 4456 - RNA, 21 nt, synthetic construct
  source 1..21: mol_type = other RNA
ctggactttgtctccttccct

SEQ ID NO: 4457 - RNA, 21 nt, synthetic construct
  source 1..21: mol_type = other RNA
ctggaggggctcaacatcgga

SEQ ID NO: 4458 - RNA, 21 nt, synthetic construct
  source 1..21: mol_type = other RNA
ctggccattgtcactttgcgc

SEQ ID NO: 4459 - RNA, 21 nt, synthetic construct
  source 1..21: mol_type = other RNA
ctggcccactgtttccccttc

SEQ ID NO: 4460 - RNA, 21 nt, synthetic construct
  source 1..21: mol_type = other RNA
ctggcccagatccttccctgc

SEQ ID NO: 4461 - RNA, 21 nt, synthetic construct
  source 1..21: mol_type = other RNA
ctggccctggccattgtcact

SEQ ID NO: 4462 - RNA, 21 nt, synthetic construct
  source 1..21: mol_type = other RNA
ctggccctggctttggcagcc

SEQ ID NO: 4463 - RNA, 21 nt, synthetic construct
  source 1..21: mol_type = other RNA
ctggccctgggcttagccact

SEQ ID NO: 4464 - RNA, 21 nt, synthetic construct
  source 1..21: mol_type = other RNA
ctggccctgggctttgccacc

SEQ ID NO: 4465 - RNA, 21 nt, synthetic construct
  source 1..21: mol_type = other RNA
ctggctcaggttcaggagagg

SEQ ID NO: 4466 - RNA, 21 nt, synthetic construct
  source 1..21: mol_type = other RNA
ctggcttctgcgccgcctctg

SEQ ID NO: 4467 - RNA, 21 nt, synthetic construct
  source 1..21: mol_type = other RNA
ctggctttagccacctctcca

SEQ ID NO: 4468 - RNA, 21 nt, synthetic construct
  source 1..21: mol_type = other RNA
ctggctttggcagcctgtgct

SEQ ID NO: 4469 - RNA, 21 nt, synthetic construct
  source 1..21: mol_type = other RNA
ctgggaaggggaaacagtggg

SEQ ID NO: 4470 - RNA, 21 nt, synthetic construct
  source 1..21: mol_type = other RNA
ctgggacggggtgtcagcata

SEQ ID NO: 4471 - RNA, 21 nt, synthetic construct
  source 1..21: mol_type = other RNA
ctgggccagccgtagaggtga

SEQ ID NO: 4472 - RNA, 21 nt, synthetic construct
  source 1..21: mol_type = other RNA
ctgggcctgtgccgctttctg

SEQ ID NO: 4473 - RNA, 21 nt, synthetic construct
  source 1..21: mol_type = other RNA
ctgggcttagccactctgtgc

SEQ ID NO: 4474 - RNA, 21 nt, synthetic construct
  source 1..21: mol_type = other RNA
ctgggctttgccaccctatgc

SEQ ID NO: 4475 - RNA, 21 nt, synthetic construct
  source 1..21: mol_type = other RNA
ctggggcagagtggtcagcac

SEQ ID NO: 4476 - RNA, 21 nt, synthetic construct
  source 1..21: mol_type = other RNA
ctggggcctgtgccatctctc

SEQ ID NO: 4477 - RNA, 21 nt, synthetic construct
  source 1..21: mol_type = other RNA
ctgggtcacctctacggctgg

SEQ ID NO: 4478 - RNA, 21 nt, synthetic construct
  source 1..21: mol_type = other RNA
ctgggtcctctccgggcatct

SEQ ID NO: 4479 - RNA, 21 nt, synthetic construct
  source 1..21: mol_type = other RNA
ctgggttcccttttccttctc

SEQ ID NO: 4480 - RNA, 21 nt, synthetic construct
  source 1..21: mol_type = other RNA
ctggtctatctgcctggccct

SEQ ID NO: 4481 - RNA, 21 nt, synthetic construct
  source 1..21: mol_type = other RNA
ctgtctgcagcttgtggcctg

SEQ ID NO: 4482 - RNA, 21 nt, synthetic construct
  source 1..21: mol_type = other RNA
ctgtgccatctctcgtttctt

SEQ ID NO: 4483 - RNA, 21 nt, synthetic construct
  source 1..21: mol_type = other RNA
ctgtgccgccggaactctgcc

SEQ ID NO: 4484 - RNA, 21 nt, synthetic construct
  source 1..21: mol_type = other RNA
ctgtgccgctttctgtctgca

SEQ ID NO: 4485 - RNA, 21 nt, synthetic construct
  source 1..21: mol_type = other RNA
ctgtgctgaccactctgcccc

SEQ ID NO: 4486 - RNA, 21 nt, synthetic construct
  source 1..21: mol_type = other RNA
ctgtgctgacccatgcagtcc

SEQ ID NO: 4487 - RNA, 21 nt, synthetic construct
  source 1..21: mol_type = other RNA
ctgtggattcgggtcacctct

SEQ ID NO: 4488 - RNA, 21 nt, synthetic construct
  source 1..21: mol_type = other RNA
ctgtgttgctgcccaaggatg

SEQ ID NO: 4489 - RNA, 21 nt, synthetic construct
  source 1..21: mol_type = other RNA
ctgtttccccttcccaggcag

SEQ ID NO: 4490 - RNA, 21 nt, synthetic construct
  source 1..21: mol_type = other RNA
cttaccatccctccctcgact

SEQ ID NO: 4491 - RNA, 21 nt, synthetic construct
  source 1..21: mol_type = other RNA
cttaccattccccttcgacca

SEQ ID NO: 4492 - RNA, 21 nt, synthetic construct
  source 1..21: mol_type = other RNA
cttaccattccccttcgacct

SEQ ID NO: 4493 - RNA, 21 nt, synthetic construct
  source 1..21: mol_type = other RNA
cttagccactctgtgctgacc

SEQ ID NO: 4494 - RNA, 21 nt, synthetic construct
  source 1..21: mol_type = other RNA
cttaggatggccttctccgac

SEQ ID NO: 4495 - RNA, 21 nt, synthetic construct
  source 1..21: mol_type = other RNA
cttcaactggccctgggctta

SEQ ID NO: 4496 - RNA, 21 nt, synthetic construct
  source 1..21: mol_type = other RNA
cttcactcgctgggttccctt

SEQ ID NO: 4497 - RNA, 21 nt, synthetic construct
  source 1..21: mol_type = other RNA
cttcaggttccgtcttcctcc

SEQ ID NO: 4498 - RNA, 21 nt, synthetic construct
  source 1..21: mol_type = other RNA
cttcccaggcaggtcctgctt

SEQ ID NO: 4499 - RNA, 21 nt, synthetic construct
  source 1..21: mol_type = other RNA
cttcccctcttccgatgttga

SEQ ID NO: 4500 - RNA, 21 nt, synthetic construct
  source 1..21: mol_type = other RNA
cttccccttgctctctgctgt

SEQ ID NO: 4501 - RNA, 21 nt, synthetic construct
  source 1..21: mol_type = other RNA
cttccctgccctgccctctcc

SEQ ID NO: 4502 - RNA, 21 nt, synthetic construct
  source 1..21: mol_type = other RNA
cttccctgccgcctccttcag

SEQ ID NO: 4503 - RNA, 21 nt, synthetic construct
  source 1..21: mol_type = other RNA
cttccgaattggagccgcttc

SEQ ID NO: 4504 - RNA, 21 nt, synthetic construct
  source 1..21: mol_type = other RNA
cttccgatgttgagcccctcc

SEQ ID NO: 4505 - RNA, 21 nt, synthetic construct
  source 1..21: mol_type = other RNA
cttccgcattggagtcgcttt

SEQ ID NO: 4506 - RNA, 21 nt, synthetic construct
  source 1..21: mol_type = other RNA
cttcctccactccctcttccc

SEQ ID NO: 4507 - RNA, 21 nt, synthetic construct
  source 1..21: mol_type = other RNA
cttccttctcggcgctgcacc

SEQ ID NO: 4508 - RNA, 21 nt, synthetic construct
  source 1..21: mol_type = other RNA
cttcgaccaccccacttccga

SEQ ID NO: 4509 - RNA, 21 nt, synthetic construct
  source 1..21: mol_type = other RNA
cttcgacctactctcttccgc

SEQ ID NO: 4510 - RNA, 21 nt, synthetic construct
  source 1..21: mol_type = other RNA
cttctccgacggatgtctccc

SEQ ID NO: 4511 - RNA, 21 nt, synthetic construct
  source 1..21: mol_type = other RNA
cttctccttctggggcctgtg

SEQ ID NO: 4512 - RNA, 21 nt, synthetic construct
  source 1..21: mol_type = other RNA
cttctcggcgctgcaccacgt

SEQ ID NO: 4513 - RNA, 21 nt, synthetic construct
  source 1..21: mol_type = other RNA
cttctgcgccgcctctggccc

SEQ ID NO: 4514 - RNA, 21 nt, synthetic construct
  source 1..21: mol_type = other RNA
cttctggggcctgtgccatct

SEQ ID NO: 4515 - RNA, 21 nt, synthetic construct
  source 1..21: mol_type = other RNA
cttcttgtaggcctgcatcat

SEQ ID NO: 4516 - RNA, 21 nt, synthetic construct
  source 1..21: mol_type = other RNA
cttgcgtcccgcctccccttc

SEQ ID NO: 4517 - RNA, 21 nt, synthetic construct
  source 1..21: mol_type = other RNA
cttgctctctgctgtgttgct

SEQ ID NO: 4518 - RNA, 21 nt, synthetic construct
  source 1..21: mol_type = other RNA
cttgctgtgccgccggaactc

SEQ ID NO: 4519 - RNA, 21 nt, synthetic construct
  source 1..21: mol_type = other RNA
cttgctttctttgcctggaca

SEQ ID NO: 4520 - RNA, 21 nt, synthetic construct
  source 1..21: mol_type = other RNA
cttgggcagcaacacagcaga

SEQ ID NO: 4521 - RNA, 21 nt, synthetic construct
  source 1..21: mol_type = other RNA
cttgtaggcctgcatcatcac

SEQ ID NO: 4522 - RNA, 21 nt, synthetic construct
  source 1..21: mol_type = other RNA
cttgtggcctgggtcacctct

SEQ ID NO: 4523 - RNA, 21 nt, synthetic construct
  source 1..21: mol_type = other RNA
ctttaactggccctggctttg

SEQ ID NO: 4524 - RNA, 21 nt, synthetic construct
  source 1..21: mol_type = other RNA
ctttagccacctctccatcct

SEQ ID NO: 4525 - RNA, 21 nt, synthetic construct
  source 1..21: mol_type = other RNA
ctttcatttgggcagctcccc

SEQ ID NO: 4526 - RNA, 21 nt, synthetic construct
  source 1..21: mol_type = other RNA
ctttccggagcacttccttct

SEQ ID NO: 4527 - RNA, 21 nt, synthetic construct
  source 1..21: mol_type = other RNA
ctttctctgacctgcattctc

SEQ ID NO: 4528 - RNA, 21 nt, synthetic construct
  source 1..21: mol_type = other RNA
ctttctgtctgcagcttgtgg

SEQ ID NO: 4529 - RNA, 21 nt, synthetic construct
  source 1..21: mol_type = other RNA
ctttctttgcctggacacccc

SEQ ID NO: 4530 - RNA, 21 nt, synthetic construct
  source 1..21: mol_type = other RNA
ctttgagctctactggcttct

SEQ ID NO: 4531 - RNA, 21 nt, synthetic construct
  source 1..21: mol_type = other RNA
ctttgccaccctatgctgaca

SEQ ID NO: 4532 - RNA, 21 nt, synthetic construct
  source 1..21: mol_type = other RNA
ctttgcctggacaccccgttc

SEQ ID NO: 4533 - RNA, 21 nt, synthetic construct
  source 1..21: mol_type = other RNA
ctttgcgctgccctcctctcg

SEQ ID NO: 4534 - RNA, 21 nt, synthetic construct
  source 1..21: mol_type = other RNA
ctttggcagcctgtgctgacc

SEQ ID NO: 4535 - RNA, 21 nt, synthetic construct
  source 1..21: mol_type = other RNA
ctttggggttgtccagaaaaa

SEQ ID NO: 4536 - RNA, 21 nt, synthetic construct
  source 1..21: mol_type = other RNA
ctttgtctccttccctgccct

SEQ ID NO: 4537 - RNA, 21 nt, synthetic construct
  source 1..21: mol_type = other RNA
cttttccttctccttctgggg

SEQ ID NO: 4538 - RNA, 21 nt, synthetic construct
  source 1..21: mol_type = other RNA
gaaaaacggtgatgatgcagg

SEQ ID NO: 4539 - RNA, 21 nt, synthetic construct
  source 1..21: mol_type = other RNA
gaaaagggaacccagcgagtg

SEQ ID NO: 4540 - RNA, 21 nt, synthetic construct
  source 1..21: mol_type = other RNA
gaaacagtgggccagaggcgg

SEQ ID NO: 4541 - RNA, 21 nt, synthetic construct
  source 1..21: mol_type = other RNA
gaaacgagagatggcacaggc

SEQ ID NO: 4542 - RNA, 21 nt, synthetic construct
  source 1..21: mol_type = other RNA
gaaagagcatccttgggcagc

SEQ ID NO: 4543 - RNA, 21 nt, synthetic construct
  source 1..21: mol_type = other RNA
gaaagcaagaggatggagagg

SEQ ID NO: 4544 - RNA, 21 nt, synthetic construct
  source 1..21: mol_type = other RNA
gaaagcaggacctgcctggga

SEQ ID NO: 4545 - RNA, 21 nt, synthetic construct
  source 1..21: mol_type = other RNA
gaaagcggcacaggcccaggg

SEQ ID NO: 4546 - RNA, 21 nt, synthetic construct
  source 1..21: mol_type = other RNA
gaaaggagtgagaggtgaccc

SEQ ID NO: 4547 - RNA, 21 nt, synthetic construct
  source 1..21: mol_type = other RNA
gaacccagcgagtgaagacgg

SEQ ID NO: 4548 - RNA, 21 nt, synthetic construct
  source 1..21: mol_type = other RNA
gaacctgaaggaggcggcagg

SEQ ID NO: 4549 - RNA, 21 nt, synthetic construct
  source 1..21: mol_type = other RNA
gaacctgagccagctcccata

SEQ ID NO: 4550 - RNA, 21 nt, synthetic construct
  source 1..21: mol_type = other RNA
gaacggggtgtccaggcaaag

SEQ ID NO: 4551 - RNA, 21 nt, synthetic construct
  source 1..21: mol_type = other RNA
gaactctgccctctaacgctg

SEQ ID NO: 4552 - RNA, 21 nt, synthetic construct
  source 1..21: mol_type = other RNA
gaagacggaacctgaaggagg

SEQ ID NO: 4553 - RNA, 21 nt, synthetic construct
  source 1..21: mol_type = other RNA
gaagacggcatggggttgggt

SEQ ID NO: 4554 - RNA, 21 nt, synthetic construct
  source 1..21: mol_type = other RNA
gaagagagtaggtcgaagggg

SEQ ID NO: 4555 - RNA, 21 nt, synthetic construct
  source 1..21: mol_type = other RNA
gaagagggagtggaggaagac

SEQ ID NO: 4556 - RNA, 21 nt, synthetic construct
  source 1..21: mol_type = other RNA
gaagaggggaagtcgagggag

SEQ ID NO: 4557 - RNA, 21 nt, synthetic construct
  source 1..21: mol_type = other RNA
gaagccagtagagctcaaagt

SEQ ID NO: 4558 - RNA, 21 nt, synthetic construct
  source 1..21: mol_type = other RNA
gaagcggctccaattcggaag

SEQ ID NO: 4559 - RNA, 21 nt, synthetic construct
  source 1..21: mol_type = other RNA
gaaggaaaagggaacccagcg

SEQ ID NO: 4560 - RNA, 21 nt, synthetic construct
  source 1..21: mol_type = other RNA
gaaggaagtgctccggaaaga

SEQ ID NO: 4561 - RNA, 21 nt, synthetic construct
  source 1..21: mol_type = other RNA
gaaggagaaggaaaagggaac

SEQ ID NO: 4562 - RNA, 21 nt, synthetic construct
  source 1..21: mol_type = other RNA
gaaggagacaaagtccaggac

SEQ ID NO: 4563 - RNA, 21 nt, synthetic construct
  source 1..21: mol_type = other RNA
gaaggaggcggcagggaagga

SEQ ID NO: 4564 - RNA, 21 nt, synthetic construct
  source 1..21: mol_type = other RNA
gaaggatctgggccagccgta

SEQ ID NO: 4565 - RNA, 21 nt, synthetic construct
  source 1..21: mol_type = other RNA
gaaggccatcctaagaaacga

SEQ ID NO: 4566 - RNA, 21 nt, synthetic construct
  source 1..21: mol_type = other RNA
gaaggggaaacagtgggccag

SEQ ID NO: 4567 - RNA, 21 nt, synthetic construct
  source 1..21: mol_type = other RNA
gaaggggaatggtaaggaggc

SEQ ID NO: 4568 - RNA, 21 nt, synthetic construct
  source 1..21: mol_type = other RNA
gaaggggaatggtaaggggga

SEQ ID NO: 4569 - RNA, 21 nt, synthetic construct
  source 1..21: mol_type = other RNA
gaaggggaggcgggacgcaag

SEQ ID NO: 4570 - RNA, 21 nt, synthetic construct
  source 1..21: mol_type = other RNA
gaagtcgagggagggatggta

SEQ ID NO: 4571 - RNA, 21 nt, synthetic construct
  source 1..21: mol_type = other RNA
gaagtgctccggaaagagcat

SEQ ID NO: 4572 - RNA, 21 nt, synthetic construct
  source 1..21: mol_type = other RNA
gaagtggggtggtcgaagggg

SEQ ID NO: 4573 - RNA, 21 nt, synthetic construct
  source 1..21: mol_type = other RNA
gaatccacaggagaacggggt

SEQ ID NO: 4574 - RNA, 21 nt, synthetic construct
  source 1..21: mol_type = other RNA
gaatgcaggtcagagaaagca

SEQ ID NO: 4575 - RNA, 21 nt, synthetic construct
  source 1..21: mol_type = other RNA
gaatggtaaggaggcctgggg

SEQ ID NO: 4576 - RNA, 21 nt, synthetic construct
  source 1..21: mol_type = other RNA
gaatggtaagggggactggga

SEQ ID NO: 4577 - RNA, 21 nt, synthetic construct
  source 1..21: mol_type = other RNA
gaattggagccgcttcaactg

SEQ ID NO: 4578 - RNA, 21 nt, synthetic construct
  source 1..21: mol_type = other RNA
gacaaagtccaggaccggctg

SEQ ID NO: 4579 - RNA, 21 nt, synthetic construct
  source 1..21: mol_type = other RNA
gacaaccccaaagtaccccgt

SEQ ID NO: 4580 - RNA, 21 nt, synthetic construct
  source 1..21: mol_type = other RNA
gacaatggccagggccaggca

SEQ ID NO: 4581 - RNA, 21 nt, synthetic construct
  source 1..21: mol_type = other RNA
gacaccccgtcccagtccccc

SEQ ID NO: 4582 - RNA, 21 nt, synthetic construct
  source 1..21: mol_type = other RNA
gacaccccgttctcctgtgga

SEQ ID NO: 4583 - RNA, 21 nt, synthetic construct
  source 1..21: mol_type = other RNA
gacacggggaggatccgctca

SEQ ID NO: 4584 - RNA, 21 nt, synthetic construct
  source 1..21: mol_type = other RNA
gacagaaagcggcacaggccc

SEQ ID NO: 4585 - RNA, 21 nt, synthetic construct
  source 1..21: mol_type = other RNA
gacatcacgtggtgcagcgcc

SEQ ID NO: 4586 - RNA, 21 nt, synthetic construct
  source 1..21: mol_type = other RNA
gacatccgtcggagaaggcca

SEQ ID NO: 4587 - RNA, 21 nt, synthetic construct
  source 1..21: mol_type = other RNA
gaccaccccacttccgaattg

SEQ ID NO: 4588 - RNA, 21 nt, synthetic construct
  source 1..21: mol_type = other RNA
gaccactctgccccaggcctc

SEQ ID NO: 4589 - RNA, 21 nt, synthetic construct
  source 1..21: mol_type = other RNA
gaccactttgagctctactgg

SEQ ID NO: 4590 - RNA, 21 nt, synthetic construct
  source 1..21: mol_type = other RNA
gaccagactgagctatgggag

SEQ ID NO: 4591 - RNA, 21 nt, synthetic construct
  source 1..21: mol_type = other RNA
gacccagacacggggaggatc

SEQ ID NO: 4592 - RNA, 21 nt, synthetic construct
  source 1..21: mol_type = other RNA
gacccaggccacaagctgcag

SEQ ID NO: 4593 - RNA, 21 nt, synthetic construct
  source 1..21: mol_type = other RNA
gacccatgcagtcctccttac

SEQ ID NO: 4594 - RNA, 21 nt, synthetic construct
  source 1..21: mol_type = other RNA
gacccgaatccacaggagaac

SEQ ID NO: 4595 - RNA, 21 nt, synthetic construct
  source 1..21: mol_type = other RNA
gaccggctggaggggctcaac

SEQ ID NO: 4596 - RNA, 21 nt, synthetic construct
  source 1..21: mol_type = other RNA
gacctactctcttccgcattg

SEQ ID NO: 4597 - RNA, 21 nt, synthetic construct
  source 1..21: mol_type = other RNA
gacctgcattctctcccctgg

SEQ ID NO: 4598 - RNA, 21 nt, synthetic construct
  source 1..21: mol_type = other RNA
gacctgcctgggaaggggaaa

SEQ ID NO: 4599 - RNA, 21 nt, synthetic construct
  source 1..21: mol_type = other RNA
gacgcaagggagacatccgtc

SEQ ID NO: 4600 - RNA, 21 nt, synthetic construct
  source 1..21: mol_type = other RNA
gacggaacctgaaggaggcgg

SEQ ID NO: 4601 - RNA, 21 nt, synthetic construct
  source 1..21: mol_type = other RNA
gacggatgtctcccttgcgtc

SEQ ID NO: 4602 - RNA, 21 nt, synthetic construct
  source 1..21: mol_type = other RNA
gacggcagcgttagagggcag

SEQ ID NO: 4603 - RNA, 21 nt, synthetic construct
  source 1..21: mol_type = other RNA
gacggcatggggttgggtgag

SEQ ID NO: 4604 - RNA, 21 nt, synthetic construct
  source 1..21: mol_type = other RNA
gacggggtactttggggttgt

SEQ ID NO: 4605 - RNA, 21 nt, synthetic construct
  source 1..21: mol_type = other RNA
gacggggtgtcagcatagggt

SEQ ID NO: 4606 - RNA, 21 nt, synthetic construct
  source 1..21: mol_type = other RNA
gactagagaggtaaggggggt

SEQ ID NO: 4607 - RNA, 21 nt, synthetic construct
  source 1..21: mol_type = other RNA
gactcaggagagagacggcag

SEQ ID NO: 4608 - RNA, 21 nt, synthetic construct
  source 1..21: mol_type = other RNA
gactccaatgcggaagagagt

SEQ ID NO: 4609 - RNA, 21 nt, synthetic construct
  source 1..21: mol_type = other RNA
gactgagctatgggagctggc

SEQ ID NO: 4610 - RNA, 21 nt, synthetic construct
  source 1..21: mol_type = other RNA
gactgcatgggtcagcacagg

SEQ ID NO: 4611 - RNA, 21 nt, synthetic construct
  source 1..21: mol_type = other RNA
gactgggacggggtgtcagca

SEQ ID NO: 4612 - RNA, 21 nt, synthetic construct
  source 1..21: mol_type = other RNA
gacttcccctcttccgatgtt

SEQ ID NO: 4613 - RNA, 21 nt, synthetic construct
  source 1..21: mol_type = other RNA
gactttgtctccttccctgcc

SEQ ID NO: 4614 - RNA, 21 nt, synthetic construct
  source 1..21: mol_type = other RNA
gagaaagcaggacctgcctgg

SEQ ID NO: 4615 - RNA, 21 nt, synthetic construct
  source 1..21: mol_type = other RNA
gagaacggggtgtccaggcaa

SEQ ID NO: 4616 - RNA, 21 nt, synthetic construct
  source 1..21: mol_type = other RNA
gagaaggaaaagggaacccag

SEQ ID NO: 4617 - RNA, 21 nt, synthetic construct
  source 1..21: mol_type = other RNA
gagaaggaagtgctccggaaa

SEQ ID NO: 4618 - RNA, 21 nt, synthetic construct
  source 1..21: mol_type = other RNA
gagaaggccatcctaagaaac

SEQ ID NO: 4619 - RNA, 21 nt, synthetic construct
  source 1..21: mol_type = other RNA
gagaatgcaggtcagagaaag

SEQ ID NO: 4620 - RNA, 21 nt, synthetic construct
  source 1..21: mol_type = other RNA
gagacaaagtccaggaccggc

SEQ ID NO: 4621 - RNA, 21 nt, synthetic construct
  source 1..21: mol_type = other RNA
gagacatccgtcggagaaggc

SEQ ID NO: 4622 - RNA, 21 nt, synthetic construct
  source 1..21: mol_type = other RNA
gagacggcagcgttagagggc

SEQ ID NO: 4623 - RNA, 21 nt, synthetic construct
  source 1..21: mol_type = other RNA
gagacggggtactttggggtt

SEQ ID NO: 4624 - RNA, 21 nt, synthetic construct
  source 1..21: mol_type = other RNA
gagagaatgcaggtcagagaa

SEQ ID NO: 4625 - RNA, 21 nt, synthetic construct
  source 1..21: mol_type = other RNA
gagagacggcagcgttagagg

SEQ ID NO: 4626 - RNA, 21 nt, synthetic construct
  source 1..21: mol_type = other RNA
gagagagacggcagcgttaga

SEQ ID NO: 4627 - RNA, 21 nt, synthetic construct
  source 1..21: mol_type = other RNA
gagagatgcccggagaggacc

SEQ ID NO: 4628 - RNA, 21 nt, synthetic construct
  source 1..21: mol_type = other RNA
gagagatggcacaggccccag

SEQ ID NO: 4629 - RNA, 21 nt, synthetic construct
  source 1..21: mol_type = other RNA
gagagcaaggggaagagggag

SEQ ID NO: 4630 - RNA, 21 nt, synthetic construct
  source 1..21: mol_type = other RNA
gagaggacccagacacgggga

SEQ ID NO: 4631 - RNA, 21 nt, synthetic construct
  source 1..21: mol_type = other RNA
gagaggagggcagcgcaaagt

SEQ ID NO: 4632 - RNA, 21 nt, synthetic construct
  source 1..21: mol_type = other RNA
gagagggcagggcagggaagg

SEQ ID NO: 4633 - RNA, 21 nt, synthetic construct
  source 1..21: mol_type = other RNA
gagaggtaaggggggtagggg

SEQ ID NO: 4634 - RNA, 21 nt, synthetic construct
  source 1..21: mol_type = other RNA
gagaggtgacccgaatccaca

SEQ ID NO: 4635 - RNA, 21 nt, synthetic construct
  source 1..21: mol_type = other RNA
gagaggtggctaaagccaggg

SEQ ID NO: 4636 - RNA, 21 nt, synthetic construct
  source 1..21: mol_type = other RNA
gagagtaggtcgaaggggaat

SEQ ID NO: 4637 - RNA, 21 nt, synthetic construct
  source 1..21: mol_type = other RNA
gagatgcccggagaggaccca

SEQ ID NO: 4638 - RNA, 21 nt, synthetic construct
  source 1..21: mol_type = other RNA
gagatggcacaggccccagaa

SEQ ID NO: 4639 - RNA, 21 nt, synthetic construct
  source 1..21: mol_type = other RNA
gagcaaggggaagagggagtg

SEQ ID NO: 4640 - RNA, 21 nt, synthetic construct
  source 1..21: mol_type = other RNA
gagcacttccttctcggcgct

SEQ ID NO: 4641 - RNA, 21 nt, synthetic construct
  source 1..21: mol_type = other RNA
gagcatccttgggcagcaaca

SEQ ID NO: 4642 - RNA, 21 nt, synthetic construct
  source 1..21: mol_type = other RNA
gagccagctcccatagctcag

SEQ ID NO: 4643 - RNA, 21 nt, synthetic construct
  source 1..21: mol_type = other RNA
gagcccctccagccggtcctg

SEQ ID NO: 4644 - RNA, 21 nt, synthetic construct
  source 1..21: mol_type = other RNA
gagccgcttcaactggccctg

SEQ ID NO: 4645 - RNA, 21 nt, synthetic construct
  source 1..21: mol_type = other RNA
gagcggatcctccccgtgtct

SEQ ID NO: 4646 - RNA, 21 nt, synthetic construct
  source 1..21: mol_type = other RNA
gagctagcacagactagagag

SEQ ID NO: 4647 - RNA, 21 nt, synthetic construct
  source 1..21: mol_type = other RNA
gagctatgggagctggctcag

SEQ ID NO: 4648 - RNA, 21 nt, synthetic construct
  source 1..21: mol_type = other RNA
gagctcaaagtggtccggact

SEQ ID NO: 4649 - RNA, 21 nt, synthetic construct
  source 1..21: mol_type = other RNA
gagctctactggcttctgcgc

SEQ ID NO: 4650 - RNA, 21 nt, synthetic construct
  source 1..21: mol_type = other RNA
gagctgcccaaatgaaaggag

SEQ ID NO: 4651 - RNA, 21 nt, synthetic construct
  source 1..21: mol_type = other RNA
gagctggctcaggttcaggag

SEQ ID NO: 4652 - RNA, 21 nt, synthetic construct
  source 1..21: mol_type = other RNA
gaggaagacggaacctgaagg

SEQ ID NO: 4653 - RNA, 21 nt, synthetic construct
  source 1..21: mol_type = other RNA
gaggacatcacgtggtgcagc

SEQ ID NO: 4654 - RNA, 21 nt, synthetic construct
  source 1..21: mol_type = other RNA
gaggacccagacacggggagg

SEQ ID NO: 4655 - RNA, 21 nt, synthetic construct
  source 1..21: mol_type = other RNA
gaggactgcatgggtcagcac

SEQ ID NO: 4656 - RNA, 21 nt, synthetic construct
  source 1..21: mol_type = other RNA
gaggagagatgcccggagagg

SEQ ID NO: 4657 - RNA, 21 nt, synthetic construct
  source 1..21: mol_type = other RNA
gaggagggcagcgcaaagtga

SEQ ID NO: 4658 - RNA, 21 nt, synthetic construct
  source 1..21: mol_type = other RNA
gaggatccgctcagaggacat

SEQ ID NO: 4659 - RNA, 21 nt, synthetic construct
  source 1..21: mol_type = other RNA
gaggatggagaggtggctaaa

SEQ ID NO: 4660 - RNA, 21 nt, synthetic construct
  source 1..21: mol_type = other RNA
gaggcctggggcagagtggtc

SEQ ID NO: 4661 - RNA, 21 nt, synthetic construct
  source 1..21: mol_type = other RNA
gaggcggcagggaaggatctg

SEQ ID NO: 4662 - RNA, 21 nt, synthetic construct
  source 1..21: mol_type = other RNA
gaggcggcgcagaagccagta

SEQ ID NO: 4663 - RNA, 21 nt, synthetic construct
  source 1..21: mol_type = other RNA
gaggcgggacgcaagggagac

SEQ ID NO: 4664 - RNA, 21 nt, synthetic construct
  source 1..21: mol_type = other RNA
gagggaggagagatgcccgga

SEQ ID NO: 4665 - RNA, 21 nt, synthetic construct
  source 1..21: mol_type = other RNA
gagggagggatggtaaggagg

SEQ ID NO: 4666 - RNA, 21 nt, synthetic construct
  source 1..21: mol_type = other RNA
gagggagtggaggaagacgga

SEQ ID NO: 4667 - RNA, 21 nt, synthetic construct
  source 1..21: mol_type = other RNA
gagggatggtaaggaggactg

SEQ ID NO: 4668 - RNA, 21 nt, synthetic construct
  source 1..21: mol_type = other RNA
gagggcagagttccggcggca

SEQ ID NO: 4669 - RNA, 21 nt, synthetic construct
  source 1..21: mol_type = other RNA
gagggcagcgcaaagtgacaa

SEQ ID NO: 4670 - RNA, 21 nt, synthetic construct
  source 1..21: mol_type = other RNA
gagggcagggcagggaaggag

SEQ ID NO: 4671 - RNA, 21 nt, synthetic construct
  source 1..21: mol_type = other RNA
gaggggaagtcgagggaggga

SEQ ID NO: 4672 - RNA, 21 nt, synthetic construct
  source 1..21: mol_type = other RNA
gaggggctcaacatcggaaga

SEQ ID NO: 4673 - RNA, 21 nt, synthetic construct
  source 1..21: mol_type = other RNA
gaggtaaggggggtaggggag

SEQ ID NO: 4674 - RNA, 21 nt, synthetic construct
  source 1..21: mol_type = other RNA
gaggtgacccaggccacaagc

SEQ ID NO: 4675 - RNA, 21 nt, synthetic construct
  source 1..21: mol_type = other RNA
gaggtgacccgaatccacagg

SEQ ID NO: 4676 - RNA, 21 nt, synthetic construct
  source 1..21: mol_type = other RNA
gaggtggctaaagccagggag

SEQ ID NO: 4677 - RNA, 21 nt, synthetic construct
  source 1..21: mol_type = other RNA
gagtaggtcgaaggggaatgg

SEQ ID NO: 4678 - RNA, 21 nt, synthetic construct
  source 1..21: mol_type = other RNA
gagtccggaccactttgagct

SEQ ID NO: 4679 - RNA, 21 nt, synthetic construct
  source 1..21: mol_type = other RNA
gagtcgctttaactggccctg

SEQ ID NO: 4680 - RNA, 21 nt, synthetic construct
  source 1..21: mol_type = other RNA
gagtgaagacggcatggggtt

SEQ ID NO: 4681 - RNA, 21 nt, synthetic construct
  source 1..21: mol_type = other RNA
gagtgagaggtgacccgaatc

SEQ ID NO: 4682 - RNA, 21 nt, synthetic construct
  source 1..21: mol_type = other RNA
gagtgcccttgctgtgccgcc

SEQ ID NO: 4683 - RNA, 21 nt, synthetic construct
  source 1..21: mol_type = other RNA
gagtggaggaagacggaacct

SEQ ID NO: 4684 - RNA, 21 nt, synthetic construct
  source 1..21: mol_type = other RNA
gagtggctaagcccagggcca

SEQ ID NO: 4685 - RNA, 21 nt, synthetic construct
  source 1..21: mol_type = other RNA
gagtggtcagcacagagtggc

SEQ ID NO: 4686 - RNA, 21 nt, synthetic construct
  source 1..21: mol_type = other RNA
gagttccggcggcacagcaag

SEQ ID NO: 4687 - RNA, 21 nt, synthetic construct
  source 1..21: mol_type = other RNA
gatagaccagactgagctatg

SEQ ID NO: 4688 - RNA, 21 nt, synthetic construct
  source 1..21: mol_type = other RNA
gatccgctcagaggacatcac

SEQ ID NO: 4689 - RNA, 21 nt, synthetic construct
  source 1..21: mol_type = other RNA
gatcctccccgtgtctgggtc

SEQ ID NO: 4690 - RNA, 21 nt, synthetic construct
  source 1..21: mol_type = other RNA
gatccttccctgccgcctcct

SEQ ID NO: 4691 - RNA, 21 nt, synthetic construct
  source 1..21: mol_type = other RNA
gatctgggccagccgtagagg

SEQ ID NO: 4692 - RNA, 21 nt, synthetic construct
  source 1..21: mol_type = other RNA
gatgatgcaggcctacaagaa

SEQ ID NO: 4693 - RNA, 21 nt, synthetic construct
  source 1..21: mol_type = other RNA
gatgcaggcctacaagaaggg

SEQ ID NO: 4694 - RNA, 21 nt, synthetic construct
  source 1..21: mol_type = other RNA
gatgcccggagaggacccaga

SEQ ID NO: 4695 - RNA, 21 nt, synthetic construct
  source 1..21: mol_type = other RNA
gatgctctttccggagcactt

SEQ ID NO: 4696 - RNA, 21 nt, synthetic construct
  source 1..21: mol_type = other RNA
gatggagaggtggctaaagcc

SEQ ID NO: 4697 - RNA, 21 nt, synthetic construct
  source 1..21: mol_type = other RNA
gatggcacaggccccagaagg

SEQ ID NO: 4698 - RNA, 21 nt, synthetic construct
  source 1..21: mol_type = other RNA
gatggccttctccgacggatg

SEQ ID NO: 4699 - RNA, 21 nt, synthetic construct
  source 1..21: mol_type = other RNA
gatggtaaggaggactgcatg

SEQ ID NO: 4700 - RNA, 21 nt, synthetic construct
  source 1..21: mol_type = other RNA
gatgtcctctgagcggatcct

SEQ ID NO: 4701 - RNA, 21 nt, synthetic construct
  source 1..21: mol_type = other RNA
gatgtctcccttgcgtcccgc

SEQ ID NO: 4702 - RNA, 21 nt, synthetic construct
  source 1..21: mol_type = other RNA
gatgttgagcccctccagccg

SEQ ID NO: 4703 - RNA, 21 nt, synthetic construct
  source 1..21: mol_type = other RNA
gattcgggtcacctctcactc

SEQ ID NO: 4704 - RNA, 21 nt, synthetic construct
  source 1..21: mol_type = other RNA
gcaaagaaagcaagaggatgg

SEQ ID NO: 4705 - RNA, 21 nt, synthetic construct
  source 1..21: mol_type = other RNA
gcaaagcccagggccaggaac

SEQ ID NO: 4706 - RNA, 21 nt, synthetic construct
  source 1..21: mol_type = other RNA
gcaaagtgacaatggccaggg

SEQ ID NO: 4707 - RNA, 21 nt, synthetic construct
  source 1..21: mol_type = other RNA
gcaacacagcagagagcaagg

SEQ ID NO: 4708 - RNA, 21 nt, synthetic construct
  source 1..21: mol_type = other RNA
gcaagaggatggagaggtggc

SEQ ID NO: 4709 - RNA, 21 nt, synthetic construct
  source 1..21: mol_type = other RNA
gcaagggagacatccgtcgga

SEQ ID NO: 4710 - RNA, 21 nt, synthetic construct
  source 1..21: mol_type = other RNA
gcaagggcactcgggggcgag

SEQ ID NO: 4711 - RNA, 21 nt, synthetic construct
  source 1..21: mol_type = other RNA
gcaaggggaagagggagtgga

SEQ ID NO: 4712 - RNA, 21 nt, synthetic construct
  source 1..21: mol_type = other RNA
gcacagactagagaggtaagg

SEQ ID NO: 4713 - RNA, 21 nt, synthetic construct
  source 1..21: mol_type = other RNA
gcacagagtggctaagcccag

SEQ ID NO: 4714 - RNA, 21 nt, synthetic construct
  source 1..21: mol_type = other RNA
gcacagcaagggcactcgggg

SEQ ID NO: 4715 - RNA, 21 nt, synthetic construct
  source 1..21: mol_type = other RNA
gcacaggcccaggggagagaa

SEQ ID NO: 4716 - RNA, 21 nt, synthetic construct
  source 1..21: mol_type = other RNA
gcacaggccccagaaggagaa

SEQ ID NO: 4717 - RNA, 21 nt, synthetic construct
  source 1..21: mol_type = other RNA
gcacaggctgccaaagccagg

SEQ ID NO: 4718 - RNA, 21 nt, synthetic construct
  source 1..21: mol_type = other RNA
gcaccacgtgatgtcctctga

SEQ ID NO: 4719 - RNA, 21 nt, synthetic construct
  source 1..21: mol_type = other RNA
gcactcgggggcgagaggagg

SEQ ID NO: 4720 - RNA, 21 nt, synthetic construct
  source 1..21: mol_type = other RNA
gcacttccttctcggcgctgc

SEQ ID NO: 4721 - RNA, 21 nt, synthetic construct
  source 1..21: mol_type = other RNA
gcagaagccagtagagctcaa

SEQ ID NO: 4722 - RNA, 21 nt, synthetic construct
  source 1..21: mol_type = other RNA
gcagacagaaagcggcacagg

SEQ ID NO: 4723 - RNA, 21 nt, synthetic construct
  source 1..21: mol_type = other RNA
gcagagagcaaggggaagagg

SEQ ID NO: 4724 - RNA, 21 nt, synthetic construct
  source 1..21: mol_type = other RNA
gcagagtggtcagcacagagt

SEQ ID NO: 4725 - RNA, 21 nt, synthetic construct
  source 1..21: mol_type = other RNA
gcagagttccggcggcacagc

SEQ ID NO: 4726 - RNA, 21 nt, synthetic construct
  source 1..21: mol_type = other RNA
gcagatagaccagactgagct

SEQ ID NO: 4727 - RNA, 21 nt, synthetic construct
  source 1..21: mol_type = other RNA
gcagcaacacagcagagagca

SEQ ID NO: 4728 - RNA, 21 nt, synthetic construct
  source 1..21: mol_type = other RNA
gcagcctgtgctgacccatgc

SEQ ID NO: 4729 - RNA, 21 nt, synthetic construct
  source 1..21: mol_type = other RNA
gcagcgcaaagtgacaatggc

SEQ ID NO: 4730 - RNA, 21 nt, synthetic construct
  source 1..21: mol_type = other RNA
gcagcgccgagaaggaagtgc

SEQ ID NO: 4731 - RNA, 21 nt, synthetic construct
  source 1..21: mol_type = other RNA
gcagcgttagagggcagagtt

SEQ ID NO: 4732 - RNA, 21 nt, synthetic construct
  source 1..21: mol_type = other RNA
gcagctcccctacccccctta

SEQ ID NO: 4733 - RNA, 21 nt, synthetic construct
  source 1..21: mol_type = other RNA
gcagcttgtggcctgggtcac

SEQ ID NO: 4734 - RNA, 21 nt, synthetic construct
  source 1..21: mol_type = other RNA
gcaggacctgcctgggaaggg

SEQ ID NO: 4735 - RNA, 21 nt, synthetic construct
  source 1..21: mol_type = other RNA
gcaggcctacaagaaggggag

SEQ ID NO: 4736 - RNA, 21 nt, synthetic construct
  source 1..21: mol_type = other RNA
gcagggaaggagacaaagtcc

SEQ ID NO: 4737 - RNA, 21 nt, synthetic construct
  source 1..21: mol_type = other RNA
gcagggaaggatctgggccag

SEQ ID NO: 4738 - RNA, 21 nt, synthetic construct
  source 1..21: mol_type = other RNA
gcagggcagggaaggagacaa

SEQ ID NO: 4739 - RNA, 21 nt, synthetic construct
  source 1..21: mol_type = other RNA
gcaggtcagagaaagcaggac

SEQ ID NO: 4740 - RNA, 21 nt, synthetic construct
  source 1..21: mol_type = other RNA
gcaggtcctgctttctctgac

SEQ ID NO: 4741 - RNA, 21 nt, synthetic construct
  source 1..21: mol_type = other RNA
gcagtcctccttaccatccct

SEQ ID NO: 4742 - RNA, 21 nt, synthetic construct
  source 1..21: mol_type = other RNA
gcatagggtggcaaagcccag

SEQ ID NO: 4743 - RNA, 21 nt, synthetic construct
  source 1..21: mol_type = other RNA
gcatcatcaccgtttttctgg

SEQ ID NO: 4744 - RNA, 21 nt, synthetic construct
  source 1..21: mol_type = other RNA
gcatccttgggcagcaacaca

SEQ ID NO: 4745 - RNA, 21 nt, synthetic construct
  source 1..21: mol_type = other RNA
gcatctctcctccctcaccca

SEQ ID NO: 4746 - RNA, 21 nt, synthetic construct
  source 1..21: mol_type = other RNA
gcatggggttgggtgagggag

SEQ ID NO: 4747 - RNA, 21 nt, synthetic construct
  source 1..21: mol_type = other RNA
gcatgggtcagcacaggctgc

SEQ ID NO: 4748 - RNA, 21 nt, synthetic construct
  source 1..21: mol_type = other RNA
gcattctctcccctgggcctg

SEQ ID NO: 4749 - RNA, 21 nt, synthetic construct
  source 1..21: mol_type = other RNA
gcattggagtcgctttaactg

SEQ ID NO: 4750 - RNA, 21 nt, synthetic construct
  source 1..21: mol_type = other RNA
gccaaagccagggccagttaa

SEQ ID NO: 4751 - RNA, 21 nt, synthetic construct
  source 1..21: mol_type = other RNA
gccacaagctgcagacagaaa

SEQ ID NO: 4752 - RNA, 21 nt, synthetic construct
  source 1..21: mol_type = other RNA
gccaccctatgctgacacccc

SEQ ID NO: 4753 - RNA, 21 nt, synthetic construct
  source 1..21: mol_type = other RNA
gccacctctccatcctcttgc

SEQ ID NO: 4754 - RNA, 21 nt, synthetic construct
  source 1..21: mol_type = other RNA
gccactctgtgctgaccactc

SEQ ID NO: 4755 - RNA, 21 nt, synthetic construct
  source 1..21: mol_type = other RNA
gccagaggcggcgcagaagcc

SEQ ID NO: 4756 - RNA, 21 nt, synthetic construct
  source 1..21: mol_type = other RNA
gccagccgtagaggtgaccca

SEQ ID NO: 4757 - RNA, 21 nt, synthetic construct
  source 1..21: mol_type = other RNA
gccagctcccatagctcagtc

SEQ ID NO: 4758 - RNA, 21 nt, synthetic construct
  source 1..21: mol_type = other RNA
gccaggcagatagaccagact

SEQ ID NO: 4759 - RNA, 21 nt, synthetic construct
  source 1..21: mol_type = other RNA
gccagggagacggggtacttt

SEQ ID NO: 4760 - RNA, 21 nt, synthetic construct
  source 1..21: mol_type = other RNA
gccagggccaggcagatagac

SEQ ID NO: 4761 - RNA, 21 nt, synthetic construct
  source 1..21: mol_type = other RNA
gccagggccagttaaagcgac

SEQ ID NO: 4762 - RNA, 21 nt, synthetic construct
  source 1..21: mol_type = other RNA
gccagtagagctcaaagtggt

SEQ ID NO: 4763 - RNA, 21 nt, synthetic construct
  source 1..21: mol_type = other RNA
gccagttaaagcgactccaat

SEQ ID NO: 4764 - RNA, 21 nt, synthetic construct
  source 1..21: mol_type = other RNA
gccagttgaagcggctccaat

SEQ ID NO: 4765 - RNA, 21 nt, synthetic construct
  source 1..21: mol_type = other RNA
gccatcctaagaaacgagaga

SEQ ID NO: 4766 - RNA, 21 nt, synthetic construct
  source 1..21: mol_type = other RNA
gccatctctcgtttcttagga

SEQ ID NO: 4767 - RNA, 21 nt, synthetic construct
  source 1..21: mol_type = other RNA
gccattgtcactttgcgctgc

SEQ ID NO: 4768 - RNA, 21 nt, synthetic construct
  source 1..21: mol_type = other RNA
gcccaaatgaaaggagtgaga

SEQ ID NO: 4769 - RNA, 21 nt, synthetic construct
  source 1..21: mol_type = other RNA
gcccaaggatgctctttccgg

SEQ ID NO: 4770 - RNA, 21 nt, synthetic construct
  source 1..21: mol_type = other RNA
gcccactgtttccccttccca

SEQ ID NO: 4771 - RNA, 21 nt, synthetic construct
  source 1..21: mol_type = other RNA
gcccagatccttccctgccgc

SEQ ID NO: 4772 - RNA, 21 nt, synthetic construct
  source 1..21: mol_type = other RNA
gcccagggccagttgaagcgg

SEQ ID NO: 4773 - RNA, 21 nt, synthetic construct
  source 1..21: mol_type = other RNA
gcccaggggagagaatgcagg

SEQ ID NO: 4774 - RNA, 21 nt, synthetic construct
  source 1..21: mol_type = other RNA
gccccagaaggagaaggaaaa

SEQ ID NO: 4775 - RNA, 21 nt, synthetic construct
  source 1..21: mol_type = other RNA
gccccaggcctccttaccatt

SEQ ID NO: 4776 - RNA, 21 nt, synthetic construct
  source 1..21: mol_type = other RNA
gcccccgagtgcccttgctgt

SEQ ID NO: 4777 - RNA, 21 nt, synthetic construct
  source 1..21: mol_type = other RNA
gccccgtcgttcctggccctg

SEQ ID NO: 4778 - RNA, 21 nt, synthetic construct
  source 1..21: mol_type = other RNA
gcccctccagccggtcctgga

SEQ ID NO: 4779 - RNA, 21 nt, synthetic construct
  source 1..21: mol_type = other RNA
gcccggagaggacccagacac

SEQ ID NO: 4780 - RNA, 21 nt, synthetic construct
  source 1..21: mol_type = other RNA
gccctcctctcgcccccgagt

SEQ ID NO: 4781 - RNA, 21 nt, synthetic construct
  source 1..21: mol_type = other RNA
gccctctaacgctgccgtctc

SEQ ID NO: 4782 - RNA, 21 nt, synthetic construct
  source 1..21: mol_type = other RNA
gccctctcctgaacctgagcc

SEQ ID NO: 4783 - RNA, 21 nt, synthetic construct
  source 1..21: mol_type = other RNA
gccctgccctctcctgaacct

SEQ ID NO: 4784 - RNA, 21 nt, synthetic construct
  source 1..21: mol_type = other RNA
gccctggccattgtcactttg

SEQ ID NO: 4785 - RNA, 21 nt, synthetic construct
  source 1..21: mol_type = other RNA
gccctggctttggcagcctgt

SEQ ID NO: 4786 - RNA, 21 nt, synthetic construct
  source 1..21: mol_type = other RNA
gccctgggcttagccactctg

SEQ ID NO: 4787 - RNA, 21 nt, synthetic construct
  source 1..21: mol_type = other RNA
gccctgggctttgccacccta

SEQ ID NO: 4788 - RNA, 21 nt, synthetic construct
  source 1..21: mol_type = other RNA
gcccttgctgtgccgccggaa

SEQ ID NO: 4789 - RNA, 21 nt, synthetic construct
  source 1..21: mol_type = other RNA
gccgagaaggaagtgctccgg

SEQ ID NO: 4790 - RNA, 21 nt, synthetic construct
  source 1..21: mol_type = other RNA
gccgccggaactctgccctct

SEQ ID NO: 4791 - RNA, 21 nt, synthetic construct
  source 1..21: mol_type = other RNA
gccgcctccttcaggttccgt

SEQ ID NO: 4792 - RNA, 21 nt, synthetic construct
  source 1..21: mol_type = other RNA
gccgcctctggcccactgttt

SEQ ID NO: 4793 - RNA, 21 nt, synthetic construct
  source 1..21: mol_type = other RNA
gccgcttcaactggccctggg

SEQ ID NO: 4794 - RNA, 21 nt, synthetic construct
  source 1..21: mol_type = other RNA
gccgctttctgtctgcagctt

SEQ ID NO: 4795 - RNA, 21 nt, synthetic construct
  source 1..21: mol_type = other RNA
gccggaactctgccctctaac

SEQ ID NO: 4796 - RNA, 21 nt, synthetic construct
  source 1..21: mol_type = other RNA
gccggtcctggactttgtctc

SEQ ID NO: 4797 - RNA, 21 nt, synthetic construct
  source 1..21: mol_type = other RNA
gccgtagaggtgacccaggcc

SEQ ID NO: 4798 - RNA, 21 nt, synthetic construct
  source 1..21: mol_type = other RNA
gccgtctctctcctgagtccg

SEQ ID NO: 4799 - RNA, 21 nt, synthetic construct
  source 1..21: mol_type = other RNA
gccgtcttcactcgctgggtt

SEQ ID NO: 4800 - RNA, 21 nt, synthetic construct
  source 1..21: mol_type = other RNA
gcctacaagaaggggaggcgg

SEQ ID NO: 4801 - RNA, 21 nt, synthetic construct
  source 1..21: mol_type = other RNA
gcctccccttcttgtaggcct

SEQ ID NO: 4802 - RNA, 21 nt, synthetic construct
  source 1..21: mol_type = other RNA
gcctccttaccattccccttc

SEQ ID NO: 4803 - RNA, 21 nt, synthetic construct
  source 1..21: mol_type = other RNA
gcctccttcaggttccgtctt

SEQ ID NO: 4804 - RNA, 21 nt, synthetic construct
  source 1..21: mol_type = other RNA
gcctctggcccactgtttccc

SEQ ID NO: 4805 - RNA, 21 nt, synthetic construct
  source 1..21: mol_type = other RNA
gcctgcatcatcaccgttttt

SEQ ID NO: 4806 - RNA, 21 nt, synthetic construct
  source 1..21: mol_type = other RNA
gcctggacaccccgttctcct

SEQ ID NO: 4807 - RNA, 21 nt, synthetic construct
  source 1..21: mol_type = other RNA
gcctggccctggccattgtca

SEQ ID NO: 4808 - RNA, 21 nt, synthetic construct
  source 1..21: mol_type = other RNA
gcctgggaaggggaaacagtg

SEQ ID NO: 4809 - RNA, 21 nt, synthetic construct
  source 1..21: mol_type = other RNA
gcctggggcagagtggtcagc

SEQ ID NO: 4810 - RNA, 21 nt, synthetic construct
  source 1..21: mol_type = other RNA
gcctgggtcacctctacggct

SEQ ID NO: 4811 - RNA, 21 nt, synthetic construct
  source 1..21: mol_type = other RNA
gcctgtgccatctctcgtttc

SEQ ID NO: 4812 - RNA, 21 nt, synthetic construct
  source 1..21: mol_type = other RNA
gcctgtgccgctttctgtctg

SEQ ID NO: 4813 - RNA, 21 nt, synthetic construct
  source 1..21: mol_type = other RNA
gcctgtgctgacccatgcagt

SEQ ID NO: 4814 - RNA, 21 nt, synthetic construct
  source 1..21: mol_type = other RNA
gccttctccgacggatgtctc

SEQ ID NO: 4815 - RNA, 21 nt, synthetic construct
  source 1..21: mol_type = other RNA
gcgactccaatgcggaagaga

SEQ ID NO: 4816 - RNA, 21 nt, synthetic construct
  source 1..21: mol_type = other RNA
gcgagaggagggcagcgcaaa

SEQ ID NO: 4817 - RNA, 21 nt, synthetic construct
  source 1..21: mol_type = other RNA
gcgagtgaagacggcatgggg

SEQ ID NO: 4818 - RNA, 21 nt, synthetic construct
  source 1..21: mol_type = other RNA
gcgcaaagtgacaatggccag

SEQ ID NO: 4819 - RNA, 21 nt, synthetic construct
  source 1..21: mol_type = other RNA
gcgcagaagccagtagagctc

SEQ ID NO: 4820 - RNA, 21 nt, synthetic construct
  source 1..21: mol_type = other RNA
gcgccgagaaggaagtgctcc

SEQ ID NO: 4821 - RNA, 21 nt, synthetic construct
  source 1..21: mol_type = other RNA
gcgccgcctctggcccactgt

SEQ ID NO: 4822 - RNA, 21 nt, synthetic construct
  source 1..21: mol_type = other RNA
gcgctgcaccacgtgatgtcc

SEQ ID NO: 4823 - RNA, 21 nt, synthetic construct
  source 1..21: mol_type = other RNA
gcgctgccctcctctcgcccc

SEQ ID NO: 4824 - RNA, 21 nt, synthetic construct
  source 1..21: mol_type = other RNA
gcggaagagagtaggtcgaag

SEQ ID NO: 4825 - RNA, 21 nt, synthetic construct
  source 1..21: mol_type = other RNA
gcggatcctccccgtgtctgg

SEQ ID NO: 4826 - RNA, 21 nt, synthetic construct
  source 1..21: mol_type = other RNA
gcggcacagcaagggcactcg

SEQ ID NO: 4827 - RNA, 21 nt, synthetic construct
  source 1..21: mol_type = other RNA
gcggcacaggcccaggggaga

SEQ ID NO: 4828 - RNA, 21 nt, synthetic construct
  source 1..21: mol_type = other RNA
gcggcagggaaggatctgggc

SEQ ID NO: 4829 - RNA, 21 nt, synthetic construct
  source 1..21: mol_type = other RNA
gcggcgcagaagccagtagag

SEQ ID NO: 4830 - RNA, 21 nt, synthetic construct
  source 1..21: mol_type = other RNA
gcggctccaattcggaagtgg

SEQ ID NO: 4831 - RNA, 21 nt, synthetic construct
  source 1..21: mol_type = other RNA
gcgggacgcaagggagacatc

SEQ ID NO: 4832 - RNA, 21 nt, synthetic construct
  source 1..21: mol_type = other RNA
gcgtcccgcctccccttcttg

SEQ ID NO: 4833 - RNA, 21 nt, synthetic construct
  source 1..21: mol_type = other RNA
gcgttagagggcagagttccg

SEQ ID NO: 4834 - RNA, 21 nt, synthetic construct
  source 1..21: mol_type = other RNA
gctaaagccagggagacgggg

SEQ ID NO: 4835 - RNA, 21 nt, synthetic construct
  source 1..21: mol_type = other RNA
gctaagcccagggccagttga

SEQ ID NO: 4836 - RNA, 21 nt, synthetic construct
  source 1..21: mol_type = other RNA
gctagcacagactagagaggt

SEQ ID NO: 4837 - RNA, 21 nt, synthetic construct
  source 1..21: mol_type = other RNA
gctatgggagctggctcaggt

SEQ ID NO: 4838 - RNA, 21 nt, synthetic construct
  source 1..21: mol_type = other RNA
gctcaaagtggtccggactca

SEQ ID NO: 4839 - RNA, 21 nt, synthetic construct
  source 1..21: mol_type = other RNA
gctcaacatcggaagagggga

SEQ ID NO: 4840 - RNA, 21 nt, synthetic construct
  source 1..21: mol_type = other RNA
gctcagaggacatcacgtggt

SEQ ID NO: 4841 - RNA, 21 nt, synthetic construct
  source 1..21: mol_type = other RNA
gctcaggttcaggagagggca

SEQ ID NO: 4842 - RNA, 21 nt, synthetic construct
  source 1..21: mol_type = other RNA
gctcagtctggtctatctgcc

SEQ ID NO: 4843 - RNA, 21 nt, synthetic construct
  source 1..21: mol_type = other RNA
gctccaattcggaagtggggt

SEQ ID NO: 4844 - RNA, 21 nt, synthetic construct
  source 1..21: mol_type = other RNA
gctcccatagctcagtctggt

SEQ ID NO: 4845 - RNA, 21 nt, synthetic construct
  source 1..21: mol_type = other RNA
gctcccctaccccccttacct

SEQ ID NO: 4846 - RNA, 21 nt, synthetic construct
  source 1..21: mol_type = other RNA
gctccggaaagagcatccttg

SEQ ID NO: 4847 - RNA, 21 nt, synthetic construct
  source 1..21: mol_type = other RNA
gctctactggcttctgcgccg

SEQ ID NO: 4848 - RNA, 21 nt, synthetic construct
  source 1..21: mol_type = other RNA
gctctctgctgtgttgctgcc

SEQ ID NO: 4849 - RNA, 21 nt, synthetic construct
  source 1..21: mol_type = other RNA
gctctttccggagcacttcct

SEQ ID NO: 4850 - RNA, 21 nt, synthetic construct
  source 1..21: mol_type = other RNA
gctgacaccccgtcccagtcc

SEQ ID NO: 4851 - RNA, 21 nt, synthetic construct
  source 1..21: mol_type = other RNA
gctgaccactctgccccaggc

SEQ ID NO: 4852 - RNA, 21 nt, synthetic construct
  source 1..21: mol_type = other RNA
gctgacccatgcagtcctcct

SEQ ID NO: 4853 - RNA, 21 nt, synthetic construct
  source 1..21: mol_type = other RNA
gctgcaccacgtgatgtcctc

SEQ ID NO: 4854 - RNA, 21 nt, synthetic construct
  source 1..21: mol_type = other RNA
gctgcagacagaaagcggcac

SEQ ID NO: 4855 - RNA, 21 nt, synthetic construct
  source 1..21: mol_type = other RNA
gctgccaaagccagggccagt

SEQ ID NO: 4856 - RNA, 21 nt, synthetic construct
  source 1..21: mol_type = other RNA
gctgcccaaatgaaaggagtg

SEQ ID NO: 4857 - RNA, 21 nt, synthetic construct
  source 1..21: mol_type = other RNA
gctgcccaaggatgctctttc

SEQ ID NO: 4858 - RNA, 21 nt, synthetic construct
  source 1..21: mol_type = other RNA
gctgccctcctctcgcccccg

SEQ ID NO: 4859 - RNA, 21 nt, synthetic construct
  source 1..21: mol_type = other RNA
gctgccgtctctctcctgagt

SEQ ID NO: 4860 - RNA, 21 nt, synthetic construct
  source 1..21: mol_type = other RNA
gctggaggggctcaacatcgg

SEQ ID NO: 4861 - RNA, 21 nt, synthetic construct
  source 1..21: mol_type = other RNA
gctggcccagatccttccctg

SEQ ID NO: 4862 - RNA, 21 nt, synthetic construct
  source 1..21: mol_type = other RNA
gctggctcaggttcaggagag

SEQ ID NO: 4863 - RNA, 21 nt, synthetic construct
  source 1..21: mol_type = other RNA
gctgggttcccttttccttct

SEQ ID NO: 4864 - RNA, 21 nt, synthetic construct
  source 1..21: mol_type = other RNA
gctgtgccgccggaactctgc

SEQ ID NO: 4865 - RNA, 21 nt, synthetic construct
  source 1..21: mol_type = other RNA
gctgtgttgctgcccaaggat

SEQ ID NO: 4866 - RNA, 21 nt, synthetic construct
  source 1..21: mol_type = other RNA
gcttagccactctgtgctgac

SEQ ID NO: 4867 - RNA, 21 nt, synthetic construct
  source 1..21: mol_type = other RNA
gcttcaactggccctgggctt

SEQ ID NO: 4868 - RNA, 21 nt, synthetic construct
  source 1..21: mol_type = other RNA
gcttctgcgccgcctctggcc

SEQ ID NO: 4869 - RNA, 21 nt, synthetic construct
  source 1..21: mol_type = other RNA
gcttgtggcctgggtcacctc

SEQ ID NO: 4870 - RNA, 21 nt, synthetic construct
  source 1..21: mol_type = other RNA
gctttaactggccctggcttt

SEQ ID NO: 4871 - RNA, 21 nt, synthetic construct
  source 1..21: mol_type = other RNA
gctttagccacctctccatcc

SEQ ID NO: 4872 - RNA, 21 nt, synthetic construct
  source 1..21: mol_type = other RNA
gctttctctgacctgcattct

SEQ ID NO: 4873 - RNA, 21 nt, synthetic construct
  source 1..21: mol_type = other RNA
gctttctgtctgcagcttgtg

SEQ ID NO: 4874 - RNA, 21 nt, synthetic construct
  source 1..21: mol_type = other RNA
gctttctttgcctggacaccc

SEQ ID NO: 4875 - RNA, 21 nt, synthetic construct
  source 1..21: mol_type = other RNA
gctttgccaccctatgctgac

SEQ ID NO: 4876 - RNA, 21 nt, synthetic construct
  source 1..21: mol_type = other RNA
gctttggcagcctgtgctgac

SEQ ID NO: 4877 - RNA, 21 nt, synthetic construct
  source 1..21: mol_type = other RNA
ggaaaagggaacccagcgagt

SEQ ID NO: 4878 - RNA, 21 nt, synthetic construct
  source 1..21: mol_type = other RNA
ggaaacagtgggccagaggcg

SEQ ID NO: 4879 - RNA, 21 nt, synthetic construct
  source 1..21: mol_type = other RNA
ggaaagagcatccttgggcag

SEQ ID NO: 4880 - RNA, 21 nt, synthetic construct
  source 1..21: mol_type = other RNA
ggaacccagcgagtgaagacg

SEQ ID NO: 4881 - RNA, 21 nt, synthetic construct
  source 1..21: mol_type = other RNA
ggaacctgaaggaggcggcag

SEQ ID NO: 4882 - RNA, 21 nt, synthetic construct
  source 1..21: mol_type = other RNA
ggaactctgccctctaacgct

SEQ ID NO: 4883 - RNA, 21 nt, synthetic construct
  source 1..21: mol_type = other RNA
ggaagacggaacctgaaggag

SEQ ID NO: 4884 - RNA, 21 nt, synthetic construct
  source 1..21: mol_type = other RNA
ggaagagagtaggtcgaaggg

SEQ ID NO: 4885 - RNA, 21 nt, synthetic construct
  source 1..21: mol_type = other RNA
ggaagagggagtggaggaaga

SEQ ID NO: 4886 - RNA, 21 nt, synthetic construct
  source 1..21: mol_type = other RNA
ggaagaggggaagtcgaggga

SEQ ID NO: 4887 - RNA, 21 nt, synthetic construct
  source 1..21: mol_type = other RNA
ggaaggagacaaagtccagga

SEQ ID NO: 4888 - RNA, 21 nt, synthetic construct
  source 1..21: mol_type = other RNA
ggaaggatctgggccagccgt

SEQ ID NO: 4889 - RNA, 21 nt, synthetic construct
  source 1..21: mol_type = other RNA
ggaaggggaaacagtgggcca

SEQ ID NO: 4890 - RNA, 21 nt, synthetic construct
  source 1..21: mol_type = other RNA
ggaagtcgagggagggatggt

SEQ ID NO: 4891 - RNA, 21 nt, synthetic construct
  source 1..21: mol_type = other RNA
ggaagtgctccggaaagagca

SEQ ID NO: 4892 - RNA, 21 nt, synthetic construct
  source 1..21: mol_type = other RNA
ggaagtggggtggtcgaaggg

SEQ ID NO: 4893 - RNA, 21 nt, synthetic construct
  source 1..21: mol_type = other RNA
ggaatggtaaggaggcctggg

SEQ ID NO: 4894 - RNA, 21 nt, synthetic construct
  source 1..21: mol_type = other RNA
ggaatggtaagggggactggg

SEQ ID NO: 4895 - RNA, 21 nt, synthetic construct
  source 1..21: mol_type = other RNA
ggacaaccccaaagtaccccg

SEQ ID NO: 4896 - RNA, 21 nt, synthetic construct
  source 1..21: mol_type = other RNA
ggacaccccgttctcctgtgg

SEQ ID NO: 4897 - RNA, 21 nt, synthetic construct
  source 1..21: mol_type = other RNA
ggacatcacgtggtgcagcgc

SEQ ID NO: 4898 - RNA, 21 nt, synthetic construct
  source 1..21: mol_type = other RNA
ggaccactttgagctctactg

SEQ ID NO: 4899 - RNA, 21 nt, synthetic construct
  source 1..21: mol_type = other RNA
ggacccagacacggggaggat

SEQ ID NO: 4900 - RNA, 21 nt, synthetic construct
  source 1..21: mol_type = other RNA
ggaccggctggaggggctcaa

SEQ ID NO: 4901 - RNA, 21 nt, synthetic construct
  source 1..21: mol_type = other RNA
ggacctgcctgggaaggggaa

SEQ ID NO: 4902 - RNA, 21 nt, synthetic construct
  source 1..21: mol_type = other RNA
ggacgcaagggagacatccgt

SEQ ID NO: 4903 - RNA, 21 nt, synthetic construct
  source 1..21: mol_type = other RNA
ggacggggtgtcagcataggg

SEQ ID NO: 4904 - RNA, 21 nt, synthetic construct
  source 1..21: mol_type = other RNA
ggactcaggagagagacggca

SEQ ID NO: 4905 - RNA, 21 nt, synthetic construct
  source 1..21: mol_type = other RNA
ggactgcatgggtcagcacag

SEQ ID NO: 4906 - RNA, 21 nt, synthetic construct
  source 1..21: mol_type = other RNA
ggactgggacggggtgtcagc

SEQ ID NO: 4907 - RNA, 21 nt, synthetic construct
  source 1..21: mol_type = other RNA
ggactttgtctccttccctgc

SEQ ID NO: 4908 - RNA, 21 nt, synthetic construct
  source 1..21: mol_type = other RNA
ggagaacggggtgtccaggca

SEQ ID NO: 4909 - RNA, 21 nt, synthetic construct
  source 1..21: mol_type = other RNA
ggagaaggaaaagggaaccca

SEQ ID NO: 4910 - RNA, 21 nt, synthetic construct
  source 1..21: mol_type = other RNA
ggagaaggccatcctaagaaa

SEQ ID NO: 4911 - RNA, 21 nt, synthetic construct
  source 1..21: mol_type = other RNA
ggagacaaagtccaggaccgg

SEQ ID NO: 4912 - RNA, 21 nt, synthetic construct
  source 1..21: mol_type = other RNA
ggagacatccgtcggagaagg

SEQ ID NO: 4913 - RNA, 21 nt, synthetic construct
  source 1..21: mol_type = other RNA
ggagacggggtactttggggt

SEQ ID NO: 4914 - RNA, 21 nt, synthetic construct
  source 1..21: mol_type = other RNA
ggagagaatgcaggtcagaga

SEQ ID NO: 4915 - RNA, 21 nt, synthetic construct
  source 1..21: mol_type = other RNA
ggagagagacggcagcgttag

SEQ ID NO: 4916 - RNA, 21 nt, synthetic construct
  source 1..21: mol_type = other RNA
ggagagatgcccggagaggac

SEQ ID NO: 4917 - RNA, 21 nt, synthetic construct
  source 1..21: mol_type = other RNA
ggagaggacccagacacgggg

SEQ ID NO: 4918 - RNA, 21 nt, synthetic construct
  source 1..21: mol_type = other RNA
ggagagggcagggcagggaag

SEQ ID NO: 4919 - RNA, 21 nt, synthetic construct
  source 1..21: mol_type = other RNA
ggagaggtggctaaagccagg

SEQ ID NO: 4920 - RNA, 21 nt, synthetic construct
  source 1..21: mol_type = other RNA
ggagcacttccttctcggcgc

SEQ ID NO: 4921 - RNA, 21 nt, synthetic construct
  source 1..21: mol_type = other RNA
ggagccgcttcaactggccct

SEQ ID NO: 4922 - RNA, 21 nt, synthetic construct
  source 1..21: mol_type = other RNA
ggagctgcccaaatgaaagga

SEQ ID NO: 4923 - RNA, 21 nt, synthetic construct
  source 1..21: mol_type = other RNA
ggagctggctcaggttcagga

SEQ ID NO: 4924 - RNA, 21 nt, synthetic construct
  source 1..21: mol_type = other RNA
ggaggaagacggaacctgaag

SEQ ID NO: 4925 - RNA, 21 nt, synthetic construct
  source 1..21: mol_type = other RNA
ggaggactgcatgggtcagca

SEQ ID NO: 4926 - RNA, 21 nt, synthetic construct
  source 1..21: mol_type = other RNA
ggaggagagatgcccggagag

SEQ ID NO: 4927 - RNA, 21 nt, synthetic construct
  source 1..21: mol_type = other RNA
ggaggatccgctcagaggaca

SEQ ID NO: 4928 - RNA, 21 nt, synthetic construct
  source 1..21: mol_type = other RNA
ggaggcctggggcagagtggt

SEQ ID NO: 4929 - RNA, 21 nt, synthetic construct
  source 1..21: mol_type = other RNA
ggaggcggcagggaaggatct

SEQ ID NO: 4930 - RNA, 21 nt, synthetic construct
  source 1..21: mol_type = other RNA
ggaggcgggacgcaagggaga

SEQ ID NO: 4931 - RNA, 21 nt, synthetic construct
  source 1..21: mol_type = other RNA
ggagggatggtaaggaggact

SEQ ID NO: 4932 - RNA, 21 nt, synthetic construct
  source 1..21: mol_type = other RNA
ggagggcagcgcaaagtgaca

SEQ ID NO: 4933 - RNA, 21 nt, synthetic construct
  source 1..21: mol_type = other RNA
ggaggggctcaacatcggaag

SEQ ID NO: 4934 - RNA, 21 nt, synthetic construct
  source 1..21: mol_type = other RNA
ggagtcgctttaactggccct

SEQ ID NO: 4935 - RNA, 21 nt, synthetic construct
  source 1..21: mol_type = other RNA
ggagtgagaggtgacccgaat

SEQ ID NO: 4936 - RNA, 21 nt, synthetic construct
  source 1..21: mol_type = other RNA
ggagtggaggaagacggaacc

SEQ ID NO: 4937 - RNA, 21 nt, synthetic construct
  source 1..21: mol_type = other RNA
ggatccgctcagaggacatca

SEQ ID NO: 4938 - RNA, 21 nt, synthetic construct
  source 1..21: mol_type = other RNA
ggatcctccccgtgtctgggt

SEQ ID NO: 4939 - RNA, 21 nt, synthetic construct
  source 1..21: mol_type = other RNA
ggatctgggccagccgtagag

SEQ ID NO: 4940 - RNA, 21 nt, synthetic construct
  source 1..21: mol_type = other RNA
ggatgctctttccggagcact

SEQ ID NO: 4941 - RNA, 21 nt, synthetic construct
  source 1..21: mol_type = other RNA
ggatggagaggtggctaaagc

SEQ ID NO: 4942 - RNA, 21 nt, synthetic construct
  source 1..21: mol_type = other RNA
ggatggccttctccgacggat

SEQ ID NO: 4943 - RNA, 21 nt, synthetic construct
  source 1..21: mol_type = other RNA
ggatggtaaggaggactgcat

SEQ ID NO: 4944 - RNA, 21 nt, synthetic construct
  source 1..21: mol_type = other RNA
ggatgtctcccttgcgtcccg

SEQ ID NO: 4945 - RNA, 21 nt, synthetic construct
  source 1..21: mol_type = other RNA
ggattcgggtcacctctcact

SEQ ID NO: 4946 - RNA, 21 nt, synthetic construct
  source 1..21: mol_type = other RNA
ggcaaagaaagcaagaggatg

SEQ ID NO: 4947 - RNA, 21 nt, synthetic construct
  source 1..21: mol_type = other RNA
ggcaaagcccagggccaggaa

SEQ ID NO: 4948 - RNA, 21 nt, synthetic construct
  source 1..21: mol_type = other RNA
ggcacagcaagggcactcggg

SEQ ID NO: 4949 - RNA, 21 nt, synthetic construct
  source 1..21: mol_type = other RNA
ggcacaggcccaggggagaga

SEQ ID NO: 4950 - RNA, 21 nt, synthetic construct
  source 1..21: mol_type = other RNA
ggcacaggccccagaaggaga

SEQ ID NO: 4951 - RNA, 21 nt, synthetic construct
  source 1..21: mol_type = other RNA
ggcactcgggggcgagaggag

SEQ ID NO: 4952 - RNA, 21 nt, synthetic construct
  source 1..21: mol_type = other RNA
ggcagagtggtcagcacagag

SEQ ID NO: 4953 - RNA, 21 nt, synthetic construct
  source 1..21: mol_type = other RNA
ggcagagttccggcggcacag

SEQ ID NO: 4954 - RNA, 21 nt, synthetic construct
  source 1..21: mol_type = other RNA
ggcagatagaccagactgagc

SEQ ID NO: 4955 - RNA, 21 nt, synthetic construct
  source 1..21: mol_type = other RNA
ggcagcaacacagcagagagc

SEQ ID NO: 4956 - RNA, 21 nt, synthetic construct
  source 1..21: mol_type = other RNA
ggcagcctgtgctgacccatg

SEQ ID NO: 4957 - RNA, 21 nt, synthetic construct
  source 1..21: mol_type = other RNA
ggcagcgcaaagtgacaatgg

SEQ ID NO: 4958 - RNA, 21 nt, synthetic construct
  source 1..21: mol_type = other RNA
ggcagcgttagagggcagagt

SEQ ID NO: 4959 - RNA, 21 nt, synthetic construct
  source 1..21: mol_type = other RNA
ggcagctcccctacccccctt

SEQ ID NO: 4960 - RNA, 21 nt, synthetic construct
  source 1..21: mol_type = other RNA
ggcagggaaggagacaaagtc

SEQ ID NO: 4961 - RNA, 21 nt, synthetic construct
  source 1..21: mol_type = other RNA
ggcagggaaggatctgggcca

SEQ ID NO: 4962 - RNA, 21 nt, synthetic construct
  source 1..21: mol_type = other RNA
ggcagggcagggaaggagaca

SEQ ID NO: 4963 - RNA, 21 nt, synthetic construct
  source 1..21: mol_type = other RNA
ggcaggtcctgctttctctga

SEQ ID NO: 4964 - RNA, 21 nt, synthetic construct
  source 1..21: mol_type = other RNA
ggcatctctcctccctcaccc

SEQ ID NO: 4965 - RNA, 21 nt, synthetic construct
  source 1..21: mol_type = other RNA
ggcatggggttgggtgaggga

SEQ ID NO: 4966 - RNA, 21 nt, synthetic construct
  source 1..21: mol_type = other RNA
ggccacaagctgcagacagaa

SEQ ID NO: 4967 - RNA, 21 nt, synthetic construct
  source 1..21: mol_type = other RNA
ggccagaggcggcgcagaagc

SEQ ID NO: 4968 - RNA, 21 nt, synthetic construct
  source 1..21: mol_type = other RNA
ggccagccgtagaggtgaccc

SEQ ID NO: 4969 - RNA, 21 nt, synthetic construct
  source 1..21: mol_type = other RNA
ggccaggcagatagaccagac

SEQ ID NO: 4970 - RNA, 21 nt, synthetic construct
  source 1..21: mol_type = other RNA
ggccagggccaggcagataga

SEQ ID NO: 4971 - RNA, 21 nt, synthetic construct
  source 1..21: mol_type = other RNA
ggccagttaaagcgactccaa

SEQ ID NO: 4972 - RNA, 21 nt, synthetic construct
  source 1..21: mol_type = other RNA
ggccagttgaagcggctccaa

SEQ ID NO: 4973 - RNA, 21 nt, synthetic construct
  source 1..21: mol_type = other RNA
ggccatcctaagaaacgagag

SEQ ID NO: 4974 - RNA, 21 nt, synthetic construct
  source 1..21: mol_type = other RNA
ggccattgtcactttgcgctg

SEQ ID NO: 4975 - RNA, 21 nt, synthetic construct
  source 1..21: mol_type = other RNA
ggcccactgtttccccttccc

SEQ ID NO: 4976 - RNA, 21 nt, synthetic construct
  source 1..21: mol_type = other RNA
ggcccagatccttccctgccg

SEQ ID NO: 4977 - RNA, 21 nt, synthetic construct
  source 1..21: mol_type = other RNA
ggcccaggggagagaatgcag

SEQ ID NO: 4978 - RNA, 21 nt, synthetic construct
  source 1..21: mol_type = other RNA
ggccccagaaggagaaggaaa

SEQ ID NO: 4979 - RNA, 21 nt, synthetic construct
  source 1..21: mol_type = other RNA
ggccctggccattgtcacttt

SEQ ID NO: 4980 - RNA, 21 nt, synthetic construct
  source 1..21: mol_type = other RNA
ggccctggctttggcagcctg

SEQ ID NO: 4981 - RNA, 21 nt, synthetic construct
  source 1..21: mol_type = other RNA
ggccctgggcttagccactct

SEQ ID NO: 4982 - RNA, 21 nt, synthetic construct
  source 1..21: mol_type = other RNA
ggccctgggctttgccaccct

SEQ ID NO: 4983 - RNA, 21 nt, synthetic construct
  source 1..21: mol_type = other RNA
ggcctacaagaaggggaggcg

SEQ ID NO: 4984 - RNA, 21 nt, synthetic construct
  source 1..21: mol_type = other RNA
ggcctccttaccattcccctt

SEQ ID NO: 4985 - RNA, 21 nt, synthetic construct
  source 1..21: mol_type = other RNA
ggcctgcatcatcaccgtttt

SEQ ID NO: 4986 - RNA, 21 nt, synthetic construct
  source 1..21: mol_type = other RNA
ggcctggggcagagtggtcag

SEQ ID NO: 4987 - RNA, 21 nt, synthetic construct
  source 1..21: mol_type = other RNA
ggcctgggtcacctctacggc

SEQ ID NO: 4988 - RNA, 21 nt, synthetic construct
  source 1..21: mol_type = other RNA
ggcctgtgccatctctcgttt

SEQ ID NO: 4989 - RNA, 21 nt, synthetic construct
  source 1..21: mol_type = other RNA
ggcctgtgccgctttctgtct

SEQ ID NO: 4990 - RNA, 21 nt, synthetic construct
  source 1..21: mol_type = other RNA
ggccttctccgacggatgtct

SEQ ID NO: 4991 - RNA, 21 nt, synthetic construct
  source 1..21: mol_type = other RNA
ggcgagaggagggcagcgcaa

SEQ ID NO: 4992 - RNA, 21 nt, synthetic construct
  source 1..21: mol_type = other RNA
ggcgcagaagccagtagagct

SEQ ID NO: 4993 - RNA, 21 nt, synthetic construct
  source 1..21: mol_type = other RNA
ggcgctgcaccacgtgatgtc

SEQ ID NO: 4994 - RNA, 21 nt, synthetic construct
  source 1..21: mol_type = other RNA
ggcggcacagcaagggcactc

SEQ ID NO: 4995 - RNA, 21 nt, synthetic construct
  source 1..21: mol_type = other RNA
ggcggcagggaaggatctggg

SEQ ID NO: 4996 - RNA, 21 nt, synthetic construct
  source 1..21: mol_type = other RNA
ggcggcgcagaagccagtaga

SEQ ID NO: 4997 - RNA, 21 nt, synthetic construct
  source 1..21: mol_type = other RNA
ggcgggacgcaagggagacat

SEQ ID NO: 4998 - RNA, 21 nt, synthetic construct
  source 1..21: mol_type = other RNA
ggctaaagccagggagacggg

SEQ ID NO: 4999 - RNA, 21 nt, synthetic construct
  source 1..21: mol_type = other RNA
ggctaagcccagggccagttg

SEQ ID NO: 5000 - RNA, 21 nt, synthetic construct
  source 1..21: mol_type = other RNA
ggctcaacatcggaagagggg

SEQ ID NO: 5001 - RNA, 21 nt, synthetic construct
  source 1..21: mol_type = other RNA
ggctcaggttcaggagagggc

SEQ ID NO: 5002 - RNA, 21 nt, synthetic construct
  source 1..21: mol_type = other RNA
ggctccaattcggaagtgggg

SEQ ID NO: 5003 - RNA, 21 nt, synthetic construct
  source 1..21: mol_type = other RNA
ggctgccaaagccagggccag

SEQ ID NO: 5004 - RNA, 21 nt, synthetic construct
  source 1..21: mol_type = other RNA
ggctggaggggctcaacatcg

SEQ ID NO: 5005 - RNA, 21 nt, synthetic construct
  source 1..21: mol_type = other RNA
ggctggcccagatccttccct

SEQ ID NO: 5006 - RNA, 21 nt, synthetic construct
  source 1..21: mol_type = other RNA
ggcttagccactctgtgctga

SEQ ID NO: 5007 - RNA, 21 nt, synthetic construct
  source 1..21: mol_type = other RNA
ggcttctgcgccgcctctggc

SEQ ID NO: 5008 - RNA, 21 nt, synthetic construct
  source 1..21: mol_type = other RNA
ggctttagccacctctccatc

SEQ ID NO: 5009 - RNA, 21 nt, synthetic construct
  source 1..21: mol_type = other RNA
ggctttgccaccctatgctga

SEQ ID NO: 5010 - RNA, 21 nt, synthetic construct
  source 1..21: mol_type = other RNA
ggctttggcagcctgtgctga

SEQ ID NO: 5011 - RNA, 21 nt, synthetic construct
  source 1..21: mol_type = other RNA
gggaaacagtgggccagaggc

SEQ ID NO: 5012 - RNA, 21 nt, synthetic construct
  source 1..21: mol_type = other RNA
gggaacccagcgagtgaagac

SEQ ID NO: 5013 - RNA, 21 nt, synthetic construct
  source 1..21: mol_type = other RNA
gggaagagggagtggaggaag

SEQ ID NO: 5014 - RNA, 21 nt, synthetic construct
  source 1..21: mol_type = other RNA
gggaaggagacaaagtccagg

SEQ ID NO: 5015 - RNA, 21 nt, synthetic construct
  source 1..21: mol_type = other RNA
gggaaggatctgggccagccg

SEQ ID NO: 5016 - RNA, 21 nt, synthetic construct
  source 1..21: mol_type = other RNA
gggaaggggaaacagtgggcc

SEQ ID NO: 5017 - RNA, 21 nt, synthetic construct
  source 1..21: mol_type = other RNA
gggaagtcgagggagggatgg

SEQ ID NO: 5018 - RNA, 21 nt, synthetic construct
  source 1..21: mol_type = other RNA
gggaatggtaaggaggcctgg

SEQ ID NO: 5019 - RNA, 21 nt, synthetic construct
  source 1..21: mol_type = other RNA
gggaatggtaagggggactgg

SEQ ID NO: 5020 - RNA, 21 nt, synthetic construct
  source 1..21: mol_type = other RNA
gggacgcaagggagacatccg

SEQ ID NO: 5021 - RNA, 21 nt, synthetic construct
  source 1..21: mol_type = other RNA
gggacggggtgtcagcatagg

SEQ ID NO: 5022 - RNA, 21 nt, synthetic construct
  source 1..21: mol_type = other RNA
gggactgggacggggtgtcag

SEQ ID NO: 5023 - RNA, 21 nt, synthetic construct
  source 1..21: mol_type = other RNA
gggagacatccgtcggagaag

SEQ ID NO: 5024 - RNA, 21 nt, synthetic construct
  source 1..21: mol_type = other RNA
gggagacggggtactttgggg

SEQ ID NO: 5025 - RNA, 21 nt, synthetic construct
  source 1..21: mol_type = other RNA
gggagagaatgcaggtcagag

SEQ ID NO: 5026 - RNA, 21 nt, synthetic construct
  source 1..21: mol_type = other RNA
gggagctgcccaaatgaaagg

SEQ ID NO: 5027 - RNA, 21 nt, synthetic construct
  source 1..21: mol_type = other RNA
gggagctggctcaggttcagg

SEQ ID NO: 5028 - RNA, 21 nt, synthetic construct
  source 1..21: mol_type = other RNA
gggaggagagatgcccggaga

SEQ ID NO: 5029 - RNA, 21 nt, synthetic construct
  source 1..21: mol_type = other RNA
gggaggatccgctcagaggac

SEQ ID NO: 5030 - RNA, 21 nt, synthetic construct
  source 1..21: mol_type = other RNA
gggaggcgggacgcaagggag

SEQ ID NO: 5031 - RNA, 21 nt, synthetic construct
  source 1..21: mol_type = other RNA
gggagggatggtaaggaggac

SEQ ID NO: 5032 - RNA, 21 nt, synthetic construct
  source 1..21: mol_type = other RNA
gggagtggaggaagacggaac

SEQ ID NO: 5033 - RNA, 21 nt, synthetic construct
  source 1..21: mol_type = other RNA
gggatggtaaggaggactgca

SEQ ID NO: 5034 - RNA, 21 nt, synthetic construct
  source 1..21: mol_type = other RNA
gggcactcgggggcgagagga

SEQ ID NO: 5035 - RNA, 21 nt, synthetic construct
  source 1..21: mol_type = other RNA
gggcagagtggtcagcacaga

SEQ ID NO: 5036 - RNA, 21 nt, synthetic construct
  source 1..21: mol_type = other RNA
gggcagagttccggcggcaca

SEQ ID NO: 5037 - RNA, 21 nt, synthetic construct
  source 1..21: mol_type = other RNA
gggcagcaacacagcagagag

SEQ ID NO: 5038 - RNA, 21 nt, synthetic construct
  source 1..21: mol_type = other RNA
gggcagcgcaaagtgacaatg

SEQ ID NO: 5039 - RNA, 21 nt, synthetic construct
  source 1..21: mol_type = other RNA
gggcagctcccctacccccct

SEQ ID NO: 5040 - RNA, 21 nt, synthetic construct
  source 1..21: mol_type = other RNA
gggcagggaaggagacaaagt

SEQ ID NO: 5041 - RNA, 21 nt, synthetic construct
  source 1..21: mol_type = other RNA
gggcagggcagggaaggagac

SEQ ID NO: 5042 - RNA, 21 nt, synthetic construct
  source 1..21: mol_type = other RNA
gggcatctctcctccctcacc

SEQ ID NO: 5043 - RNA, 21 nt, synthetic construct
  source 1..21: mol_type = other RNA
gggccagaggcggcgcagaag

SEQ ID NO: 5044 - RNA, 21 nt, synthetic construct
  source 1..21: mol_type = other RNA
gggccagccgtagaggtgacc

SEQ ID NO: 5045 - RNA, 21 nt, synthetic construct
  source 1..21: mol_type = other RNA
gggccaggcagatagaccaga

SEQ ID NO: 5046 - RNA, 21 nt, synthetic construct
  source 1..21: mol_type = other RNA
gggccagttaaagcgactcca

SEQ ID NO: 5047 - RNA, 21 nt, synthetic construct
  source 1..21: mol_type = other RNA
gggccagttgaagcggctcca

SEQ ID NO: 5048 - RNA, 21 nt, synthetic construct
  source 1..21: mol_type = other RNA
gggcctgtgccatctctcgtt

SEQ ID NO: 5049 - RNA, 21 nt, synthetic construct
  source 1..21: mol_type = other RNA
gggcctgtgccgctttctgtc

SEQ ID NO: 5050 - RNA, 21 nt, synthetic construct
  source 1..21: mol_type = other RNA
gggcgagaggagggcagcgca

SEQ ID NO: 5051 - RNA, 21 nt, synthetic construct
  source 1..21: mol_type = other RNA
gggctcaacatcggaagaggg

SEQ ID NO: 5052 - RNA, 21 nt, synthetic construct
  source 1..21: mol_type = other RNA
gggcttagccactctgtgctg

SEQ ID NO: 5053 - RNA, 21 nt, synthetic construct
  source 1..21: mol_type = other RNA
gggctttgccaccctatgctg

SEQ ID NO: 5054 - RNA, 21 nt, synthetic construct
  source 1..21: mol_type = other RNA
ggggaaacagtgggccagagg

SEQ ID NO: 5055 - RNA, 21 nt, synthetic construct
  source 1..21: mol_type = other RNA
ggggaagagggagtggaggaa

SEQ ID NO: 5056 - RNA, 21 nt, synthetic construct
  source 1..21: mol_type = other RNA
ggggaagtcgagggagggatg

SEQ ID NO: 5057 - RNA, 21 nt, synthetic construct
  source 1..21: mol_type = other RNA
ggggaatggtaaggaggcctg

SEQ ID NO: 5058 - RNA, 21 nt, synthetic construct
  source 1..21: mol_type = other RNA
ggggaatggtaagggggactg

SEQ ID NO: 5059 - RNA, 21 nt, synthetic construct
  source 1..21: mol_type = other RNA
ggggactgggacggggtgtca

SEQ ID NO: 5060 - RNA, 21 nt, synthetic construct
  source 1..21: mol_type = other RNA
ggggagagaatgcaggtcaga

SEQ ID NO: 5061 - RNA, 21 nt, synthetic construct
  source 1..21: mol_type = other RNA
ggggagctgcccaaatgaaag

SEQ ID NO: 5062 - RNA, 21 nt, synthetic construct
  source 1..21: mol_type = other RNA
ggggaggatccgctcagagga

SEQ ID NO: 5063 - RNA, 21 nt, synthetic construct
  source 1..21: mol_type = other RNA
ggggaggcgggacgcaaggga

SEQ ID NO: 5064 - RNA, 21 nt, synthetic construct
  source 1..21: mol_type = other RNA
ggggcagagtggtcagcacag

SEQ ID NO: 5065 - RNA, 21 nt, synthetic construct
  source 1..21: mol_type = other RNA
ggggcctgtgccatctctcgt

SEQ ID NO: 5066 - RNA, 21 nt, synthetic construct
  source 1..21: mol_type = other RNA
ggggcgagaggagggcagcgc

SEQ ID NO: 5067 - RNA, 21 nt, synthetic construct
  source 1..21: mol_type = other RNA
ggggctcaacatcggaagagg

SEQ ID NO: 5068 - RNA, 21 nt, synthetic construct
  source 1..21: mol_type = other RNA
gggggactgggacggggtgtc

SEQ ID NO: 5069 - RNA, 21 nt, synthetic construct
  source 1..21: mol_type = other RNA
gggggcgagaggagggcagcg

SEQ ID NO: 5070 - RNA, 21 nt, synthetic construct
  source 1..21: mol_type = other RNA
ggggggtaggggagctgccca

SEQ ID NO: 5071 - RNA, 21 nt, synthetic construct
  source 1..21: mol_type = other RNA
gggggtaggggagctgcccaa

SEQ ID NO: 5072 - RNA, 21 nt, synthetic construct
  source 1..21: mol_type = other RNA
ggggtactttggggttgtcca

SEQ ID NO: 5073 - RNA, 21 nt, synthetic construct
  source 1..21: mol_type = other RNA
ggggtaggggagctgcccaaa

SEQ ID NO: 5074 - RNA, 21 nt, synthetic construct
  source 1..21: mol_type = other RNA
ggggtggtcgaaggggaatgg

SEQ ID NO: 5075 - RNA, 21 nt, synthetic construct
  source 1..21: mol_type = other RNA
ggggtgtcagcatagggtggc

SEQ ID NO: 5076 - RNA, 21 nt, synthetic construct
  source 1..21: mol_type = other RNA
ggggtgtccaggcaaagaaag

SEQ ID NO: 5077 - RNA, 21 nt, synthetic construct
  source 1..21: mol_type = other RNA
ggggttgggtgagggaggaga

SEQ ID NO: 5078 - RNA, 21 nt, synthetic construct
  source 1..21: mol_type = other RNA
ggggttgtccagaaaaacggt

SEQ ID NO: 5079 - RNA, 21 nt, synthetic construct
  source 1..21: mol_type = other RNA
gggtactttggggttgtccag

SEQ ID NO: 5080 - RNA, 21 nt, synthetic construct
  source 1..21: mol_type = other RNA
gggtaggggagctgcccaaat

SEQ ID NO: 5081 - RNA, 21 nt, synthetic construct
  source 1..21: mol_type = other RNA
gggtcacctctacggctggcc

SEQ ID NO: 5082 - RNA, 21 nt, synthetic construct
  source 1..21: mol_type = other RNA
gggtcacctctcactcctttc

SEQ ID NO: 5083 - RNA, 21 nt, synthetic construct
  source 1..21: mol_type = other RNA
gggtcagcacaggctgccaaa

SEQ ID NO: 5084 - RNA, 21 nt, synthetic construct
  source 1..21: mol_type = other RNA
gggtcctctccgggcatctct

SEQ ID NO: 5085 - RNA, 21 nt, synthetic construct
  source 1..21: mol_type = other RNA
gggtgagggaggagagatgcc

SEQ ID NO: 5086 - RNA, 21 nt, synthetic construct
  source 1..21: mol_type = other RNA
gggtggcaaagcccagggcca

SEQ ID NO: 5087 - RNA, 21 nt, synthetic construct
  source 1..21: mol_type = other RNA
gggtggtcgaaggggaatggt

SEQ ID NO: 5088 - RNA, 21 nt, synthetic construct
  source 1..21: mol_type = other RNA
gggtgtcagcatagggtggca

SEQ ID NO: 5089 - RNA, 21 nt, synthetic construct
  source 1..21: mol_type = other RNA
gggtgtccaggcaaagaaagc

SEQ ID NO: 5090 - RNA, 21 nt, synthetic construct
  source 1..21: mol_type = other RNA
gggttcccttttccttctcct

SEQ ID NO: 5091 - RNA, 21 nt, synthetic construct
  source 1..21: mol_type = other RNA
gggttgggtgagggaggagag

SEQ ID NO: 5092 - RNA, 21 nt, synthetic construct
  source 1..21: mol_type = other RNA
gggttgtccagaaaaacggtg

SEQ ID NO: 5093 - RNA, 21 nt, synthetic construct
  source 1..21: mol_type = other RNA
ggtaaggaggactgcatgggt

SEQ ID NO: 5094 - RNA, 21 nt, synthetic construct
  source 1..21: mol_type = other RNA
ggtaaggaggcctggggcaga

SEQ ID NO: 5095 - RNA, 21 nt, synthetic construct
  source 1..21: mol_type = other RNA
ggtaagggggactgggacggg

SEQ ID NO: 5096 - RNA, 21 nt, synthetic construct
  source 1..21: mol_type = other RNA
ggtaaggggggtaggggagct

SEQ ID NO: 5097 - RNA, 21 nt, synthetic construct
  source 1..21: mol_type = other RNA
ggtactttggggttgtccaga

SEQ ID NO: 5098 - RNA, 21 nt, synthetic construct
  source 1..21: mol_type = other RNA
ggtaggggagctgcccaaatg

SEQ ID NO: 5099 - RNA, 21 nt, synthetic construct
  source 1..21: mol_type = other RNA
ggtcacctctacggctggccc

SEQ ID NO: 5100 - RNA, 21 nt, synthetic construct
  source 1..21: mol_type = other RNA
ggtcacctctcactcctttca

SEQ ID NO: 5101 - RNA, 21 nt, synthetic construct
  source 1..21: mol_type = other RNA
ggtcagagaaagcaggacctg

SEQ ID NO: 5102 - RNA, 21 nt, synthetic construct
  source 1..21: mol_type = other RNA
ggtcagcacagagtggctaag

SEQ ID NO: 5103 - RNA, 21 nt, synthetic construct
  source 1..21: mol_type = other RNA
ggtcagcacaggctgccaaag

SEQ ID NO: 5104 - RNA, 21 nt, synthetic construct
  source 1..21: mol_type = other RNA
ggtccggactcaggagagaga

SEQ ID NO: 5105 - RNA, 21 nt, synthetic construct
  source 1..21: mol_type = other RNA
ggtcctctccgggcatctctc

SEQ ID NO: 5106 - RNA, 21 nt, synthetic construct
  source 1..21: mol_type = other RNA
ggtcctgctttctctgacctg

SEQ ID NO: 5107 - RNA, 21 nt, synthetic construct
  source 1..21: mol_type = other RNA
ggtcctggactttgtctcctt

SEQ ID NO: 5108 - RNA, 21 nt, synthetic construct
  source 1..21: mol_type = other RNA
ggtcgaaggggaatggtaagg

SEQ ID NO: 5109 - RNA, 21 nt, synthetic construct
  source 1..21: mol_type = other RNA
ggtctatctgcctggccctgg

SEQ ID NO: 5110 - RNA, 21 nt, synthetic construct
  source 1..21: mol_type = other RNA
ggtgacccaggccacaagctg

SEQ ID NO: 5111 - RNA, 21 nt, synthetic construct
  source 1..21: mol_type = other RNA
ggtgacccgaatccacaggag

SEQ ID NO: 5112 - RNA, 21 nt, synthetic construct
  source 1..21: mol_type = other RNA
ggtgagggaggagagatgccc

SEQ ID NO: 5113 - RNA, 21 nt, synthetic construct
  source 1..21: mol_type = other RNA
ggtgatgatgcaggcctacaa

SEQ ID NO: 5114 - RNA, 21 nt, synthetic construct
  source 1..21: mol_type = other RNA
ggtgcagcgccgagaaggaag

SEQ ID NO: 5115 - RNA, 21 nt, synthetic construct
  source 1..21: mol_type = other RNA
ggtggcaaagcccagggccag

SEQ ID NO: 5116 - RNA, 21 nt, synthetic construct
  source 1..21: mol_type = other RNA
ggtggctaaagccagggagac

SEQ ID NO: 5117 - RNA, 21 nt, synthetic construct
  source 1..21: mol_type = other RNA
ggtggtcgaaggggaatggta

SEQ ID NO: 5118 - RNA, 21 nt, synthetic construct
  source 1..21: mol_type = other RNA
ggtgtcagcatagggtggcaa

SEQ ID NO: 5119 - RNA, 21 nt, synthetic construct
  source 1..21: mol_type = other RNA
ggtgtccaggcaaagaaagca

SEQ ID NO: 5120 - RNA, 21 nt, synthetic construct
  source 1..21: mol_type = other RNA
ggttcaggagagggcagggca

SEQ ID NO: 5121 - RNA, 21 nt, synthetic construct
  source 1..21: mol_type = other RNA
ggttcccttttccttctcctt

SEQ ID NO: 5122 - RNA, 21 nt, synthetic construct
  source 1..21: mol_type = other RNA
ggttccgtcttcctccactcc

SEQ ID NO: 5123 - RNA, 21 nt, synthetic construct
  source 1..21: mol_type = other RNA
ggttgggtgagggaggagaga

SEQ ID NO: 5124 - RNA, 21 nt, synthetic construct
  source 1..21: mol_type = other RNA
ggttgtccagaaaaacggtga

SEQ ID NO: 5125 - RNA, 21 nt, synthetic construct
  source 1..21: mol_type = other RNA
gtaaggaggactgcatgggtc

SEQ ID NO: 5126 - RNA, 21 nt, synthetic construct
  source 1..21: mol_type = other RNA
gtaaggaggcctggggcagag

SEQ ID NO: 5127 - RNA, 21 nt, synthetic construct
  source 1..21: mol_type = other RNA
gtaagggggactgggacgggg

SEQ ID NO: 5128 - RNA, 21 nt, synthetic construct
  source 1..21: mol_type = other RNA
gtaaggggggtaggggagctg

SEQ ID NO: 5129 - RNA, 21 nt, synthetic construct
  source 1..21: mol_type = other RNA
gtaccccgtctccctggcttt

SEQ ID NO: 5130 - RNA, 21 nt, synthetic construct
  source 1..21: mol_type = other RNA
gtactttggggttgtccagaa

SEQ ID NO: 5131 - RNA, 21 nt, synthetic construct
  source 1..21: mol_type = other RNA
gtagagctcaaagtggtccgg

SEQ ID NO: 5132 - RNA, 21 nt, synthetic construct
  source 1..21: mol_type = other RNA
gtagaggtgacccaggccaca

SEQ ID NO: 5133 - RNA, 21 nt, synthetic construct
  source 1..21: mol_type = other RNA
gtaggcctgcatcatcaccgt

SEQ ID NO: 5134 - RNA, 21 nt, synthetic construct
  source 1..21: mol_type = other RNA
gtaggggagctgcccaaatga

SEQ ID NO: 5135 - RNA, 21 nt, synthetic construct
  source 1..21: mol_type = other RNA
gtaggtcgaaggggaatggta

SEQ ID NO: 5136 - RNA, 21 nt, synthetic construct
  source 1..21: mol_type = other RNA
gtcacctctacggctggccca

SEQ ID NO: 5137 - RNA, 21 nt, synthetic construct
  source 1..21: mol_type = other RNA
gtcacctctcactcctttcat

SEQ ID NO: 5138 - RNA, 21 nt, synthetic construct
  source 1..21: mol_type = other RNA
gtcactttgcgctgccctcct

SEQ ID NO: 5139 - RNA, 21 nt, synthetic construct
  source 1..21: mol_type = other RNA
gtcagagaaagcaggacctgc

SEQ ID NO: 5140 - RNA, 21 nt, synthetic construct
  source 1..21: mol_type = other RNA
gtcagcacagagtggctaagc

SEQ ID NO: 5141 - RNA, 21 nt, synthetic construct
  source 1..21: mol_type = other RNA
gtcagcacaggctgccaaagc

SEQ ID NO: 5142 - RNA, 21 nt, synthetic construct
  source 1..21: mol_type = other RNA
gtcagcatagggtggcaaagc

SEQ ID NO: 5143 - RNA, 21 nt, synthetic construct
  source 1..21: mol_type = other RNA
gtccagaaaaacggtgatgat

SEQ ID NO: 5144 - RNA, 21 nt, synthetic construct
  source 1..21: mol_type = other RNA
gtccaggaccggctggagggg

SEQ ID NO: 5145 - RNA, 21 nt, synthetic construct
  source 1..21: mol_type = other RNA
gtccaggcaaagaaagcaaga

SEQ ID NO: 5146 - RNA, 21 nt, synthetic construct
  source 1..21: mol_type = other RNA
gtcccagtcccccttaccatt

SEQ ID NO: 5147 - RNA, 21 nt, synthetic construct
  source 1..21: mol_type = other RNA
gtcccccttaccattcccctt

SEQ ID NO: 5148 - RNA, 21 nt, synthetic construct
  source 1..21: mol_type = other RNA
gtcccgcctccccttcttgta

SEQ ID NO: 5149 - RNA, 21 nt, synthetic construct
  source 1..21: mol_type = other RNA
gtccggaccactttgagctct

SEQ ID NO: 5150 - RNA, 21 nt, synthetic construct
  source 1..21: mol_type = other RNA
gtccggactcaggagagagac

SEQ ID NO: 5151 - RNA, 21 nt, synthetic construct
  source 1..21: mol_type = other RNA
gtcctccttaccatccctccc

SEQ ID NO: 5152 - RNA, 21 nt, synthetic construct
  source 1..21: mol_type = other RNA
gtcctctccgggcatctctcc

SEQ ID NO: 5153 - RNA, 21 nt, synthetic construct
  source 1..21: mol_type = other RNA
gtcctctgagcggatcctccc

SEQ ID NO: 5154 - RNA, 21 nt, synthetic construct
  source 1..21: mol_type = other RNA
gtcctgctttctctgacctgc

SEQ ID NO: 5155 - RNA, 21 nt, synthetic construct
  source 1..21: mol_type = other RNA
gtcctggactttgtctccttc

SEQ ID NO: 5156 - RNA, 21 nt, synthetic construct
  source 1..21: mol_type = other RNA
gtcgaaggggaatggtaagga

SEQ ID NO: 5157 - RNA, 21 nt, synthetic construct
  source 1..21: mol_type = other RNA
gtcgaaggggaatggtaaggg

SEQ ID NO: 5158 - RNA, 21 nt, synthetic construct
  source 1..21: mol_type = other RNA
gtcgagggagggatggtaagg

SEQ ID NO: 5159 - RNA, 21 nt, synthetic construct
  source 1..21: mol_type = other RNA
gtcgctttaactggccctggc

SEQ ID NO: 5160 - RNA, 21 nt, synthetic construct
  source 1..21: mol_type = other RNA
gtcggagaaggccatcctaag

SEQ ID NO: 5161 - RNA, 21 nt, synthetic construct
  source 1..21: mol_type = other RNA
gtcgttcctggccctgggctt

SEQ ID NO: 5162 - RNA, 21 nt, synthetic construct
  source 1..21: mol_type = other RNA
gtctatctgcctggccctggc

SEQ ID NO: 5163 - RNA, 21 nt, synthetic construct
  source 1..21: mol_type = other RNA
gtctccctggctttagccacc

SEQ ID NO: 5164 - RNA, 21 nt, synthetic construct
  source 1..21: mol_type = other RNA
gtctcccttgcgtcccgcctc

SEQ ID NO: 5165 - RNA, 21 nt, synthetic construct
  source 1..21: mol_type = other RNA
gtctccttccctgccctgccc

SEQ ID NO: 5166 - RNA, 21 nt, synthetic construct
  source 1..21: mol_type = other RNA
gtctctctcctgagtccggac

SEQ ID NO: 5167 - RNA, 21 nt, synthetic construct
  source 1..21: mol_type = other RNA
gtctgcagcttgtggcctggg

SEQ ID NO: 5168 - RNA, 21 nt, synthetic construct
  source 1..21: mol_type = other RNA
gtctgggtcctctccgggcat

SEQ ID NO: 5169 - RNA, 21 nt, synthetic construct
  source 1..21: mol_type = other RNA
gtctggtctatctgcctggcc

SEQ ID NO: 5170 - RNA, 21 nt, synthetic construct
  source 1..21: mol_type = other RNA
gtcttcactcgctgggttccc

SEQ ID NO: 5171 - RNA, 21 nt, synthetic construct
  source 1..21: mol_type = other RNA
gtcttcctccactccctcttc

SEQ ID NO: 5172 - RNA, 21 nt, synthetic construct
  source 1..21: mol_type = other RNA
gtgaagacggcatggggttgg

SEQ ID NO: 5173 - RNA, 21 nt, synthetic construct
  source 1..21: mol_type = other RNA
gtgacaatggccagggccagg

SEQ ID NO: 5174 - RNA, 21 nt, synthetic construct
  source 1..21: mol_type = other RNA
gtgacccaggccacaagctgc

SEQ ID NO: 5175 - RNA, 21 nt, synthetic construct
  source 1..21: mol_type = other RNA
gtgacccgaatccacaggaga

SEQ ID NO: 5176 - RNA, 21 nt, synthetic construct
  source 1..21: mol_type = other RNA
gtgagaggtgacccgaatcca

SEQ ID NO: 5177 - RNA, 21 nt, synthetic construct
  source 1..21: mol_type = other RNA
gtgagggaggagagatgcccg

SEQ ID NO: 5178 - RNA, 21 nt, synthetic construct
  source 1..21: mol_type = other RNA
gtgatgatgcaggcctacaag

SEQ ID NO: 5179 - RNA, 21 nt, synthetic construct
  source 1..21: mol_type = other RNA
gtgatgtcctctgagcggatc

SEQ ID NO: 5180 - RNA, 21 nt, synthetic construct
  source 1..21: mol_type = other RNA
gtgcagcgccgagaaggaagt

SEQ ID NO: 5181 - RNA, 21 nt, synthetic construct
  source 1..21: mol_type = other RNA
gtgccatctctcgtttcttag

SEQ ID NO: 5182 - RNA, 21 nt, synthetic construct
  source 1..21: mol_type = other RNA
gtgcccttgctgtgccgccgg

SEQ ID NO: 5183 - RNA, 21 nt, synthetic construct
  source 1..21: mol_type = other RNA
gtgccgccggaactctgccct

SEQ ID NO: 5184 - RNA, 21 nt, synthetic construct
  source 1..21: mol_type = other RNA
gtgccgctttctgtctgcagc

SEQ ID NO: 5185 - RNA, 21 nt, synthetic construct
  source 1..21: mol_type = other RNA
gtgctccggaaagagcatcct

SEQ ID NO: 5186 - RNA, 21 nt, synthetic construct
  source 1..21: mol_type = other RNA
gtgctgaccactctgccccag

SEQ ID NO: 5187 - RNA, 21 nt, synthetic construct
  source 1..21: mol_type = other RNA
gtgctgacccatgcagtcctc

SEQ ID NO: 5188 - RNA, 21 nt, synthetic construct
  source 1..21: mol_type = other RNA
gtggaggaagacggaacctga

SEQ ID NO: 5189 - RNA, 21 nt, synthetic construct
  source 1..21: mol_type = other RNA
gtggattcgggtcacctctca

SEQ ID NO: 5190 - RNA, 21 nt, synthetic construct
  source 1..21: mol_type = other RNA
gtggcaaagcccagggccagg

SEQ ID NO: 5191 - RNA, 21 nt, synthetic construct
  source 1..21: mol_type = other RNA
gtggcctgggtcacctctacg

SEQ ID NO: 5192 - RNA, 21 nt, synthetic construct
  source 1..21: mol_type = other RNA
gtggctaaagccagggagacg

SEQ ID NO: 5193 - RNA, 21 nt, synthetic construct
  source 1..21: mol_type = other RNA
gtggctaagcccagggccagt

SEQ ID NO: 5194 - RNA, 21 nt, synthetic construct
  source 1..21: mol_type = other RNA
gtgggccagaggcggcgcaga

SEQ ID NO: 5195 - RNA, 21 nt, synthetic construct
  source 1..21: mol_type = other RNA
gtggggtggtcgaaggggaat

SEQ ID NO: 5196 - RNA, 21 nt, synthetic construct
  source 1..21: mol_type = other RNA
gtggtcagcacagagtggcta

SEQ ID NO: 5197 - RNA, 21 nt, synthetic construct
  source 1..21: mol_type = other RNA
gtggtccggactcaggagaga

SEQ ID NO: 5198 - RNA, 21 nt, synthetic construct
  source 1..21: mol_type = other RNA
gtggtcgaaggggaatggtaa

SEQ ID NO: 5199 - RNA, 21 nt, synthetic construct
  source 1..21: mol_type = other RNA
gtggtgcagcgccgagaagga

SEQ ID NO: 5200 - RNA, 21 nt, synthetic construct
  source 1..21: mol_type = other RNA
gtgtcagcatagggtggcaaa

SEQ ID NO: 5201 - RNA, 21 nt, synthetic construct
  source 1..21: mol_type = other RNA
gtgtccaggcaaagaaagcaa

SEQ ID NO: 5202 - RNA, 21 nt, synthetic construct
  source 1..21: mol_type = other RNA
gtgtctgggtcctctccgggc

SEQ ID NO: 5203 - RNA, 21 nt, synthetic construct
  source 1..21: mol_type = other RNA
gtgttgctgcccaaggatgct

SEQ ID NO: 5204 - RNA, 21 nt, synthetic construct
  source 1..21: mol_type = other RNA
gttaaagcgactccaatgcgg

SEQ ID NO: 5205 - RNA, 21 nt, synthetic construct
  source 1..21: mol_type = other RNA
gttagagggcagagttccggc

SEQ ID NO: 5206 - RNA, 21 nt, synthetic construct
  source 1..21: mol_type = other RNA
gttcaggagagggcagggcag

SEQ ID NO: 5207 - RNA, 21 nt, synthetic construct
  source 1..21: mol_type = other RNA
gttcccttttccttctccttc

SEQ ID NO: 5208 - RNA, 21 nt, synthetic construct
  source 1..21: mol_type = other RNA
gttccggcggcacagcaaggg

SEQ ID NO: 5209 - RNA, 21 nt, synthetic construct
  source 1..21: mol_type = other RNA
gttccgtcttcctccactccc

SEQ ID NO: 5210 - RNA, 21 nt, synthetic construct
  source 1..21: mol_type = other RNA
gttcctggccctgggctttgc

SEQ ID NO: 5211 - RNA, 21 nt, synthetic construct
  source 1..21: mol_type = other RNA
gttctcctgtggattcgggtc

SEQ ID NO: 5212 - RNA, 21 nt, synthetic construct
  source 1..21: mol_type = other RNA
gttgaagcggctccaattcgg

SEQ ID NO: 5213 - RNA, 21 nt, synthetic construct
  source 1..21: mol_type = other RNA
gttgagcccctccagccggtc

SEQ ID NO: 5214 - RNA, 21 nt, synthetic construct
  source 1..21: mol_type = other RNA
gttgctgcccaaggatgctct

SEQ ID NO: 5215 - RNA, 21 nt, synthetic construct
  source 1..21: mol_type = other RNA
gttgggtgagggaggagagat

SEQ ID NO: 5216 - RNA, 21 nt, synthetic construct
  source 1..21: mol_type = other RNA
gttgtccagaaaaacggtgat

SEQ ID NO: 5217 - RNA, 21 nt, synthetic construct
  source 1..21: mol_type = other RNA
gtttccccttcccaggcaggt

SEQ ID NO: 5218 - RNA, 21 nt, synthetic construct
  source 1..21: mol_type = other RNA
gtttcttaggatggccttctc

SEQ ID NO: 5219 - RNA, 21 nt, synthetic construct
  source 1..21: mol_type = other RNA
gtttttctggacaaccccaaa

SEQ ID NO: 5220 - RNA, 21 nt, synthetic construct
  source 1..21: mol_type = other RNA
taaagccagggagacggggta

SEQ ID NO: 5221 - RNA, 21 nt, synthetic construct
  source 1..21: mol_type = other RNA
taaagcgactccaatgcggaa

SEQ ID NO: 5222 - RNA, 21 nt, synthetic construct
  source 1..21: mol_type = other RNA
taacgctgccgtctctctcct

SEQ ID NO: 5223 - RNA, 21 nt, synthetic construct
  source 1..21: mol_type = other RNA
taactggccctggctttggca

SEQ ID NO: 5224 - RNA, 21 nt, synthetic construct
  source 1..21: mol_type = other RNA
taagaaacgagagatggcaca

SEQ ID NO: 5225 - RNA, 21 nt, synthetic construct
  source 1..21: mol_type = other RNA
taagcccagggccagttgaag

SEQ ID NO: 5226 - RNA, 21 nt, synthetic construct
  source 1..21: mol_type = other RNA
taaggaggactgcatgggtca

SEQ ID NO: 5227 - RNA, 21 nt, synthetic construct
  source 1..21: mol_type = other RNA
taaggaggcctggggcagagt

SEQ ID NO: 5228 - RNA, 21 nt, synthetic construct
  source 1..21: mol_type = other RNA
taagggggactgggacggggt

SEQ ID NO: 5229 - RNA, 21 nt, synthetic construct
  source 1..21: mol_type = other RNA
taaggggggtaggggagctgc

SEQ ID NO: 5230 - RNA, 21 nt, synthetic construct
  source 1..21: mol_type = other RNA
tacaagaaggggaggcgggac

SEQ ID NO: 5231 - RNA, 21 nt, synthetic construct
  source 1..21: mol_type = other RNA
taccatccctccctcgacttc

SEQ ID NO: 5232 - RNA, 21 nt, synthetic construct
  source 1..21: mol_type = other RNA
taccattccccttcgaccacc

SEQ ID NO: 5233 - RNA, 21 nt, synthetic construct
  source 1..21: mol_type = other RNA
taccattccccttcgacctac

SEQ ID NO: 5234 - RNA, 21 nt, synthetic construct
  source 1..21: mol_type = other RNA
taccccccttacctctctagt

SEQ ID NO: 5235 - RNA, 21 nt, synthetic construct
  source 1..21: mol_type = other RNA
taccccgtctccctggcttta

SEQ ID NO: 5236 - RNA, 21 nt, synthetic construct
  source 1..21: mol_type = other RNA
tacggctggcccagatccttc

SEQ ID NO: 5237 - RNA, 21 nt, synthetic construct
  source 1..21: mol_type = other RNA
tactctcttccgcattggagt

SEQ ID NO: 5238 - RNA, 21 nt, synthetic construct
  source 1..21: mol_type = other RNA
tactggcttctgcgccgcctc

SEQ ID NO: 5239 - RNA, 21 nt, synthetic construct
  source 1..21: mol_type = other RNA
tactttggggttgtccagaaa

SEQ ID NO: 5240 - RNA, 21 nt, synthetic construct
  source 1..21: mol_type = other RNA
tagaccagactgagctatggg

SEQ ID NO: 5241 - RNA, 21 nt, synthetic construct
  source 1..21: mol_type = other RNA
tagagaggtaaggggggtagg

SEQ ID NO: 5242 - RNA, 21 nt, synthetic construct
  source 1..21: mol_type = other RNA
tagagctcaaagtggtccgga

SEQ ID NO: 5243 - RNA, 21 nt, synthetic construct
  source 1..21: mol_type = other RNA
tagagggcagagttccggcgg

SEQ ID NO: 5244 - RNA, 21 nt, synthetic construct
  source 1..21: mol_type = other RNA
tagaggtgacccaggccacaa

SEQ ID NO: 5245 - RNA, 21 nt, synthetic construct
  source 1..21: mol_type = other RNA
tagcacagactagagaggtaa

SEQ ID NO: 5246 - RNA, 21 nt, synthetic construct
  source 1..21: mol_type = other RNA
tagccacctctccatcctctt

SEQ ID NO: 5247 - RNA, 21 nt, synthetic construct
  source 1..21: mol_type = other RNA
tagccactctgtgctgaccac

SEQ ID NO: 5248 - RNA, 21 nt, synthetic construct
  source 1..21: mol_type = other RNA
tagctcagtctggtctatctg

SEQ ID NO: 5249 - RNA, 21 nt, synthetic construct
  source 1..21: mol_type = other RNA
taggatggccttctccgacgg

SEQ ID NO: 5250 - RNA, 21 nt, synthetic construct
  source 1..21: mol_type = other RNA
taggcctgcatcatcaccgtt

SEQ ID NO: 5251 - RNA, 21 nt, synthetic construct
  source 1..21: mol_type = other RNA
taggggagctgcccaaatgaa

SEQ ID NO: 5252 - RNA, 21 nt, synthetic construct
  source 1..21: mol_type = other RNA
tagggtggcaaagcccagggc

SEQ ID NO: 5253 - RNA, 21 nt, synthetic construct
  source 1..21: mol_type = other RNA
taggtcgaaggggaatggtaa

SEQ ID NO: 5254 - RNA, 21 nt, synthetic construct
  source 1..21: mol_type = other RNA
tatctgcctggccctggccat

SEQ ID NO: 5255 - RNA, 21 nt, synthetic construct
  source 1..21: mol_type = other RNA
tatgctgacaccccgtcccag

SEQ ID NO: 5256 - RNA, 21 nt, synthetic construct
  source 1..21: mol_type = other RNA
tatgggagctggctcaggttc

SEQ ID NO: 5257 - RNA, 21 nt, synthetic construct
  source 1..21: mol_type = other RNA
tcaaagtggtccggactcagg

SEQ ID NO: 5258 - RNA, 21 nt, synthetic construct
  source 1..21: mol_type = other RNA
tcaacatcggaagaggggaag

SEQ ID NO: 5259 - RNA, 21 nt, synthetic construct
  source 1..21: mol_type = other RNA
tcaactggccctgggcttagc

SEQ ID NO: 5260 - RNA, 21 nt, synthetic construct
  source 1..21: mol_type = other RNA
tcacccaaccccatgccgtct

SEQ ID NO: 5261 - RNA, 21 nt, synthetic construct
  source 1..21: mol_type = other RNA
tcaccgtttttctggacaacc

SEQ ID NO: 5262 - RNA, 21 nt, synthetic construct
  source 1..21: mol_type = other RNA
tcacctctacggctggcccag

SEQ ID NO: 5263 - RNA, 21 nt, synthetic construct
  source 1..21: mol_type = other RNA
tcacctctcactcctttcatt

SEQ ID NO: 5264 - RNA, 21 nt, synthetic construct
  source 1..21: mol_type = other RNA
tcacgtggtgcagcgccgaga

SEQ ID NO: 5265 - RNA, 21 nt, synthetic construct
  source 1..21: mol_type = other RNA
tcactcctttcatttgggcag

SEQ ID NO: 5266 - RNA, 21 nt, synthetic construct
  source 1..21: mol_type = other RNA
tcactcgctgggttccctttt

SEQ ID NO: 5267 - RNA, 21 nt, synthetic construct
  source 1..21: mol_type = other RNA
tcactttgcgctgccctcctc

SEQ ID NO: 5268 - RNA, 21 nt, synthetic construct
  source 1..21: mol_type = other RNA
tcagagaaagcaggacctgcc

SEQ ID NO: 5269 - RNA, 21 nt, synthetic construct
  source 1..21: mol_type = other RNA
tcagaggacatcacgtggtgc

SEQ ID NO: 5270 - RNA, 21 nt, synthetic construct
  source 1..21: mol_type = other RNA
tcagcacagagtggctaagcc

SEQ ID NO: 5271 - RNA, 21 nt, synthetic construct
  source 1..21: mol_type = other RNA
tcagcacaggctgccaaagcc

SEQ ID NO: 5272 - RNA, 21 nt, synthetic construct
  source 1..21: mol_type = other RNA
tcagcatagggtggcaaagcc

SEQ ID NO: 5273 - RNA, 21 nt, synthetic construct
  source 1..21: mol_type = other RNA
tcaggagagagacggcagcgt

SEQ ID NO: 5274 - RNA, 21 nt, synthetic construct
  source 1..21: mol_type = other RNA
tcaggagagggcagggcaggg

SEQ ID NO: 5275 - RNA, 21 nt, synthetic construct
  source 1..21: mol_type = other RNA
tcaggttcaggagagggcagg

SEQ ID NO: 5276 - RNA, 21 nt, synthetic construct
  source 1..21: mol_type = other RNA
tcaggttccgtcttcctccac

SEQ ID NO: 5277 - RNA, 21 nt, synthetic construct
  source 1..21: mol_type = other RNA
tcagtctggtctatctgcctg

SEQ ID NO: 5278 - RNA, 21 nt, synthetic construct
  source 1..21: mol_type = other RNA
tcatcaccgtttttctggaca

SEQ ID NO: 5279 - RNA, 21 nt, synthetic construct
  source 1..21: mol_type = other RNA
tcatttgggcagctcccctac

SEQ ID NO: 5280 - RNA, 21 nt, synthetic construct
  source 1..21: mol_type = other RNA
tccaatgcggaagagagtagg

SEQ ID NO: 5281 - RNA, 21 nt, synthetic construct
  source 1..21: mol_type = other RNA
tccaattcggaagtggggtgg

SEQ ID NO: 5282 - RNA, 21 nt, synthetic construct
  source 1..21: mol_type = other RNA
tccacaggagaacggggtgtc

SEQ ID NO: 5283 - RNA, 21 nt, synthetic construct
  source 1..21: mol_type = other RNA
tccactccctcttccccttgc

SEQ ID NO: 5284 - RNA, 21 nt, synthetic construct
  source 1..21: mol_type = other RNA
tccagaaaaacggtgatgatg

SEQ ID NO: 5285 - RNA, 21 nt, synthetic construct
  source 1..21: mol_type = other RNA
tccagccggtcctggactttg

SEQ ID NO: 5286 - RNA, 21 nt, synthetic construct
  source 1..21: mol_type = other RNA
tccaggaccggctggaggggc

SEQ ID NO: 5287 - RNA, 21 nt, synthetic construct
  source 1..21: mol_type = other RNA
tccaggcaaagaaagcaagag

SEQ ID NO: 5288 - RNA, 21 nt, synthetic construct
  source 1..21: mol_type = other RNA
tccatcctcttgctttctttg

SEQ ID NO: 5289 - RNA, 21 nt, synthetic construct
  source 1..21: mol_type = other RNA
tcccaggcaggtcctgctttc

SEQ ID NO: 5290 - RNA, 21 nt, synthetic construct
  source 1..21: mol_type = other RNA
tcccagtcccccttaccattc

SEQ ID NO: 5291 - RNA, 21 nt, synthetic construct
  source 1..21: mol_type = other RNA
tcccatagctcagtctggtct

SEQ ID NO: 5292 - RNA, 21 nt, synthetic construct
  source 1..21: mol_type = other RNA
tcccccttaccattccccttc

SEQ ID NO: 5293 - RNA, 21 nt, synthetic construct
  source 1..21: mol_type = other RNA
tccccgtgtctgggtcctctc

SEQ ID NO: 5294 - RNA, 21 nt, synthetic construct
  source 1..21: mol_type = other RNA
tcccctaccccccttacctct

SEQ ID NO: 5295 - RNA, 21 nt, synthetic construct
  source 1..21: mol_type = other RNA
tcccctcttccgatgttgagc

SEQ ID NO: 5296 - RNA, 21 nt, synthetic construct
  source 1..21: mol_type = other RNA
tcccctgggcctgtgccgctt

SEQ ID NO: 5297 - RNA, 21 nt, synthetic construct
  source 1..21: mol_type = other RNA
tccccttcccaggcaggtcct

SEQ ID NO: 5298 - RNA, 21 nt, synthetic construct
  source 1..21: mol_type = other RNA
tccccttcgaccaccccactt

SEQ ID NO: 5299 - RNA, 21 nt, synthetic construct
  source 1..21: mol_type = other RNA
tccccttcgacctactctctt

SEQ ID NO: 5300 - RNA, 21 nt, synthetic construct
  source 1..21: mol_type = other RNA
tccccttcttgtaggcctgca

SEQ ID NO: 5301 - RNA, 21 nt, synthetic construct
  source 1..21: mol_type = other RNA
tccccttgctctctgctgtgt

SEQ ID NO: 5302 - RNA, 21 nt, synthetic construct
  source 1..21: mol_type = other RNA
tcccgcctccccttcttgtag

SEQ ID NO: 5303 - RNA, 21 nt, synthetic construct
  source 1..21: mol_type = other RNA
tccctcacccaaccccatgcc

SEQ ID NO: 5304 - RNA, 21 nt, synthetic construct
  source 1..21: mol_type = other RNA
tccctccctcgacttcccctc

SEQ ID NO: 5305 - RNA, 21 nt, synthetic construct
  source 1..21: mol_type = other RNA
tccctcgacttcccctcttcc

SEQ ID NO: 5306 - RNA, 21 nt, synthetic construct
  source 1..21: mol_type = other RNA
tccctcttccccttgctctct

SEQ ID NO: 5307 - RNA, 21 nt, synthetic construct
  source 1..21: mol_type = other RNA
tccctgccctgccctctcctg

SEQ ID NO: 5308 - RNA, 21 nt, synthetic construct
  source 1..21: mol_type = other RNA
tccctgccgcctccttcaggt

SEQ ID NO: 5309 - RNA, 21 nt, synthetic construct
  source 1..21: mol_type = other RNA
tccctggctttagccacctct

SEQ ID NO: 5310 - RNA, 21 nt, synthetic construct
  source 1..21: mol_type = other RNA
tcccttgcgtcccgcctcccc

SEQ ID NO: 5311 - RNA, 21 nt, synthetic construct
  source 1..21: mol_type = other RNA
tcccttttccttctccttctg

SEQ ID NO: 5312 - RNA, 21 nt, synthetic construct
  source 1..21: mol_type = other RNA
tccgaattggagccgcttcaa

SEQ ID NO: 5313 - RNA, 21 nt, synthetic construct
  source 1..21: mol_type = other RNA
tccgacggatgtctcccttgc

SEQ ID NO: 5314 - RNA, 21 nt, synthetic construct
  source 1..21: mol_type = other RNA
tccgatgttgagcccctccag

SEQ ID NO: 5315 - RNA, 21 nt, synthetic construct
  source 1..21: mol_type = other RNA
tccgcattggagtcgctttaa

SEQ ID NO: 5316 - RNA, 21 nt, synthetic construct
  source 1..21: mol_type = other RNA
tccgctcagaggacatcacgt

SEQ ID NO: 5317 - RNA, 21 nt, synthetic construct
  source 1..21: mol_type = other RNA
tccggaaagagcatccttggg

SEQ ID NO: 5318 - RNA, 21 nt, synthetic construct
  source 1..21: mol_type = other RNA
tccggaccactttgagctcta

SEQ ID NO: 5319 - RNA, 21 nt, synthetic construct
  source 1..21: mol_type = other RNA
tccggactcaggagagagacg

SEQ ID NO: 5320 - RNA, 21 nt, synthetic construct
  source 1..21: mol_type = other RNA
tccggagcacttccttctcgg

SEQ ID NO: 5321 - RNA, 21 nt, synthetic construct
  source 1..21: mol_type = other RNA
tccggcggcacagcaagggca

SEQ ID NO: 5322 - RNA, 21 nt, synthetic construct
  source 1..21: mol_type = other RNA
tccgggcatctctcctccctc

SEQ ID NO: 5323 - RNA, 21 nt, synthetic construct
  source 1..21: mol_type = other RNA
tccgtcggagaaggccatcct

SEQ ID NO: 5324 - RNA, 21 nt, synthetic construct
  source 1..21: mol_type = other RNA
tccgtcttcctccactccctc

SEQ ID NO: 5325 - RNA, 21 nt, synthetic construct
  source 1..21: mol_type = other RNA
tcctaagaaacgagagatggc

SEQ ID NO: 5326 - RNA, 21 nt, synthetic construct
  source 1..21: mol_type = other RNA
tcctccactccctcttcccct

SEQ ID NO: 5327 - RNA, 21 nt, synthetic construct
  source 1..21: mol_type = other RNA
tcctccccgtgtctgggtcct

SEQ ID NO: 5328 - RNA, 21 nt, synthetic construct
  source 1..21: mol_type = other RNA
tcctccctcacccaaccccat

SEQ ID NO: 5329 - RNA, 21 nt, synthetic construct
  source 1..21: mol_type = other RNA
tcctccttaccatccctccct

SEQ ID NO: 5330 - RNA, 21 nt, synthetic construct
  source 1..21: mol_type = other RNA
tcctctccgggcatctctcct

SEQ ID NO: 5331 - RNA, 21 nt, synthetic construct
  source 1..21: mol_type = other RNA
tcctctcgcccccgagtgccc

SEQ ID NO: 5332 - RNA, 21 nt, synthetic construct
  source 1..21: mol_type = other RNA
tcctctgagcggatcctcccc

SEQ ID NO: 5333 - RNA, 21 nt, synthetic construct
  source 1..21: mol_type = other RNA
tcctcttgctttctttgcctg

SEQ ID NO: 5334 - RNA, 21 nt, synthetic construct
  source 1..21: mol_type = other RNA
tcctgaacctgagccagctcc

SEQ ID NO: 5335 - RNA, 21 nt, synthetic construct
  source 1..21: mol_type = other RNA
tcctgagtccggaccactttg

SEQ ID NO: 5336 - RNA, 21 nt, synthetic construct
  source 1..21: mol_type = other RNA
tcctgctttctctgacctgca

SEQ ID NO: 5337 - RNA, 21 nt, synthetic construct
  source 1..21: mol_type = other RNA
tcctggactttgtctccttcc

SEQ ID NO: 5338 - RNA, 21 nt, synthetic construct
  source 1..21: mol_type = other RNA
tcctggccctgggctttgcca

SEQ ID NO: 5339 - RNA, 21 nt, synthetic construct
  source 1..21: mol_type = other RNA
tcctgtggattcgggtcacct

SEQ ID NO: 5340 - RNA, 21 nt, synthetic construct
  source 1..21: mol_type = other RNA
tccttaccatccctccctcga

SEQ ID NO: 5341 - RNA, 21 nt, synthetic construct
  source 1..21: mol_type = other RNA
tccttaccattccccttcgac

SEQ ID NO: 5342 - RNA, 21 nt, synthetic construct
  source 1..21: mol_type = other RNA
tccttcaggttccgtcttcct

SEQ ID NO: 5343 - RNA, 21 nt, synthetic construct
  source 1..21: mol_type = other RNA
tccttccctgccctgccctct

SEQ ID NO: 5344 - RNA, 21 nt, synthetic construct
  source 1..21: mol_type = other RNA
tccttccctgccgcctccttc

SEQ ID NO: 5345 - RNA, 21 nt, synthetic construct
  source 1..21: mol_type = other RNA
tccttctccttctggggcctg

SEQ ID NO: 5346 - RNA, 21 nt, synthetic construct
  source 1..21: mol_type = other RNA
tccttctcggcgctgcaccac

SEQ ID NO: 5347 - RNA, 21 nt, synthetic construct
  source 1..21: mol_type = other RNA
tccttctggggcctgtgccat

SEQ ID NO: 5348 - RNA, 21 nt, synthetic construct
  source 1..21: mol_type = other RNA
tccttgggcagcaacacagca

SEQ ID NO: 5349 - RNA, 21 nt, synthetic construct
  source 1..21: mol_type = other RNA
tcctttcatttgggcagctcc

SEQ ID NO: 5350 - RNA, 21 nt, synthetic construct
  source 1..21: mol_type = other RNA
tcgaaggggaatggtaaggag

SEQ ID NO: 5351 - RNA, 21 nt, synthetic construct
  source 1..21: mol_type = other RNA
tcgaaggggaatggtaagggg

SEQ ID NO: 5352 - RNA, 21 nt, synthetic construct
  source 1..21: mol_type = other RNA
tcgaccaccccacttccgaat

SEQ ID NO: 5353 - RNA, 21 nt, synthetic construct
  source 1..21: mol_type = other RNA
tcgacctactctcttccgcat

SEQ ID NO: 5354 - RNA, 21 nt, synthetic construct
  source 1..21: mol_type = other RNA
tcgacttcccctcttccgatg

SEQ ID NO: 5355 - RNA, 21 nt, synthetic construct
  source 1..21: mol_type = other RNA
tcgagggagggatggtaagga

SEQ ID NO: 5356 - RNA, 21 nt, synthetic construct
  source 1..21: mol_type = other RNA
tcgcccccgagtgcccttgct

SEQ ID NO: 5357 - RNA, 21 nt, synthetic construct
  source 1..21: mol_type = other RNA
tcgctgggttcccttttcctt

SEQ ID NO: 5358 - RNA, 21 nt, synthetic construct
  source 1..21: mol_type = other RNA
tcgctttaactggccctggct

SEQ ID NO: 5359 - RNA, 21 nt, synthetic construct
  source 1..21: mol_type = other RNA
tcggaagaggggaagtcgagg

SEQ ID NO: 5360 - RNA, 21 nt, synthetic construct
  source 1..21: mol_type = other RNA
tcggaagtggggtggtcgaag

SEQ ID NO: 5361 - RNA, 21 nt, synthetic construct
  source 1..21: mol_type = other RNA
tcggagaaggccatcctaaga

SEQ ID NO: 5362 - RNA, 21 nt, synthetic construct
  source 1..21: mol_type = other RNA
tcggcgctgcaccacgtgatg

SEQ ID NO: 5363 - RNA, 21 nt, synthetic construct
  source 1..21: mol_type = other RNA
tcgggggcgagaggagggcag

SEQ ID NO: 5364 - RNA, 21 nt, synthetic construct
  source 1..21: mol_type = other RNA
tcgggtcacctctcactcctt

SEQ ID NO: 5365 - RNA, 21 nt, synthetic construct
  source 1..21: mol_type = other RNA
tcgttcctggccctgggcttt

SEQ ID NO: 5366 - RNA, 21 nt, synthetic construct
  source 1..21: mol_type = other RNA
tcgtttcttaggatggccttc

SEQ ID NO: 5367 - RNA, 21 nt, synthetic construct
  source 1..21: mol_type = other RNA
tctaacgctgccgtctctctc

SEQ ID NO: 5368 - RNA, 21 nt, synthetic construct
  source 1..21: mol_type = other RNA
tctacggctggcccagatcct

SEQ ID NO: 5369 - RNA, 21 nt, synthetic construct
  source 1..21: mol_type = other RNA
tctactggcttctgcgccgcc

SEQ ID NO: 5370 - RNA, 21 nt, synthetic construct
  source 1..21: mol_type = other RNA
tctatctgcctggccctggcc

SEQ ID NO: 5371 - RNA, 21 nt, synthetic construct
  source 1..21: mol_type = other RNA
tctcactcctttcatttgggc

SEQ ID NO: 5372 - RNA, 21 nt, synthetic construct
  source 1..21: mol_type = other RNA
tctccatcctcttgctttctt

SEQ ID NO: 5373 - RNA, 21 nt, synthetic construct
  source 1..21: mol_type = other RNA
tctcccctgggcctgtgccgc

SEQ ID NO: 5374 - RNA, 21 nt, synthetic construct
  source 1..21: mol_type = other RNA
tctccctggctttagccacct

SEQ ID NO: 5375 - RNA, 21 nt, synthetic construct
  source 1..21: mol_type = other RNA
tctcccttgcgtcccgcctcc

SEQ ID NO: 5376 - RNA, 21 nt, synthetic construct
  source 1..21: mol_type = other RNA
tctccgacggatgtctccctt

SEQ ID NO: 5377 - RNA, 21 nt, synthetic construct
  source 1..21: mol_type = other RNA
tctccgggcatctctcctccc

SEQ ID NO: 5378 - RNA, 21 nt, synthetic construct
  source 1..21: mol_type = other RNA
tctcctccctcacccaacccc

SEQ ID NO: 5379 - RNA, 21 nt, synthetic construct
  source 1..21: mol_type = other RNA
tctcctgaacctgagccagct

SEQ ID NO: 5380 - RNA, 21 nt, synthetic construct
  source 1..21: mol_type = other RNA
tctcctgagtccggaccactt

SEQ ID NO: 5381 - RNA, 21 nt, synthetic construct
  source 1..21: mol_type = other RNA
tctcctgtggattcgggtcac

SEQ ID NO: 5382 - RNA, 21 nt, synthetic construct
  source 1..21: mol_type = other RNA
tctccttccctgccctgccct

SEQ ID NO: 5383 - RNA, 21 nt, synthetic construct
  source 1..21: mol_type = other RNA
tctccttctggggcctgtgcc

SEQ ID NO: 5384 - RNA, 21 nt, synthetic construct
  source 1..21: mol_type = other RNA
tctcgcccccgagtgcccttg

SEQ ID NO: 5385 - RNA, 21 nt, synthetic construct
  source 1..21: mol_type = other RNA
tctcggcgctgcaccacgtga

SEQ ID NO: 5386 - RNA, 21 nt, synthetic construct
  source 1..21: mol_type = other RNA
tctcgtttcttaggatggcct

SEQ ID NO: 5387 - RNA, 21 nt, synthetic construct
  source 1..21: mol_type = other RNA
tctctcccctgggcctgtgcc

SEQ ID NO: 5388 - RNA, 21 nt, synthetic construct
  source 1..21: mol_type = other RNA
tctctcctccctcacccaacc

SEQ ID NO: 5389 - RNA, 21 nt, synthetic construct
  source 1..21: mol_type = other RNA
tctctcctgagtccggaccac

SEQ ID NO: 5390 - RNA, 21 nt, synthetic construct
  source 1..21: mol_type = other RNA
tctctcgtttcttaggatggc

SEQ ID NO: 5391 - RNA, 21 nt, synthetic construct
  source 1..21: mol_type = other RNA
tctctctcctgagtccggacc

SEQ ID NO: 5392 - RNA, 21 nt, synthetic construct
  source 1..21: mol_type = other RNA
tctctgacctgcattctctcc

SEQ ID NO: 5393 - RNA, 21 nt, synthetic construct
  source 1..21: mol_type = other RNA
tctctgctgtgttgctgccca

SEQ ID NO: 5394 - RNA, 21 nt, synthetic construct
  source 1..21: mol_type = other RNA
tctcttccgcattggagtcgc

SEQ ID NO: 5395 - RNA, 21 nt, synthetic construct
  source 1..21: mol_type = other RNA
tctgacctgcattctctcccc

SEQ ID NO: 5396 - RNA, 21 nt, synthetic construct
  source 1..21: mol_type = other RNA
tctgagcggatcctccccgtg

SEQ ID NO: 5397 - RNA, 21 nt, synthetic construct
  source 1..21: mol_type = other RNA
tctgcagcttgtggcctgggt

SEQ ID NO: 5398 - RNA, 21 nt, synthetic construct
  source 1..21: mol_type = other RNA
tctgccccaggcctccttacc

SEQ ID NO: 5399 - RNA, 21 nt, synthetic construct
  source 1..21: mol_type = other RNA
tctgccctctaacgctgccgt

SEQ ID NO: 5400 - RNA, 21 nt, synthetic construct
  source 1..21: mol_type = other RNA
tctgcctggccctggccattg

SEQ ID NO: 5401 - RNA, 21 nt, synthetic construct
  source 1..21: mol_type = other RNA
tctgcgccgcctctggcccac

SEQ ID NO: 5402 - RNA, 21 nt, synthetic construct
  source 1..21: mol_type = other RNA
tctgctgtgttgctgcccaag

SEQ ID NO: 5403 - RNA, 21 nt, synthetic construct
  source 1..21: mol_type = other RNA
tctggacaaccccaaagtacc

SEQ ID NO: 5404 - RNA, 21 nt, synthetic construct
  source 1..21: mol_type = other RNA
tctggcccactgtttcccctt

SEQ ID NO: 5405 - RNA, 21 nt, synthetic construct
  source 1..21: mol_type = other RNA
tctgggccagccgtagaggtg

SEQ ID NO: 5406 - RNA, 21 nt, synthetic construct
  source 1..21: mol_type = other RNA
tctggggcctgtgccatctct

SEQ ID NO: 5407 - RNA, 21 nt, synthetic construct
  source 1..21: mol_type = other RNA
tctgggtcctctccgggcatc

SEQ ID NO: 5408 - RNA, 21 nt, synthetic construct
  source 1..21: mol_type = other RNA
tctggtctatctgcctggccc

SEQ ID NO: 5409 - RNA, 21 nt, synthetic construct
  source 1..21: mol_type = other RNA
tctgtctgcagcttgtggcct

SEQ ID NO: 5410 - RNA, 21 nt, synthetic construct
  source 1..21: mol_type = other RNA
tctgtgctgaccactctgccc

SEQ ID NO: 5411 - RNA, 21 nt, synthetic construct
  source 1..21: mol_type = other RNA
tcttaggatggccttctccga

SEQ ID NO: 5412 - RNA, 21 nt, synthetic construct
  source 1..21: mol_type = other RNA
tcttcactcgctgggttccct

SEQ ID NO: 5413 - RNA, 21 nt, synthetic construct
  source 1..21: mol_type = other RNA
tcttccccttgctctctgctg

SEQ ID NO: 5414 - RNA, 21 nt, synthetic construct
  source 1..21: mol_type = other RNA
tcttccgatgttgagcccctc

SEQ ID NO: 5415 - RNA, 21 nt, synthetic construct
  source 1..21: mol_type = other RNA
tcttccgcattggagtcgctt

SEQ ID NO: 5416 - RNA, 21 nt, synthetic construct
  source 1..21: mol_type = other RNA
tcttcctccactccctcttcc

SEQ ID NO: 5417 - RNA, 21 nt, synthetic construct
  source 1..21: mol_type = other RNA
tcttgctttctttgcctggac

SEQ ID NO: 5418 - RNA, 21 nt, synthetic construct
  source 1..21: mol_type = other RNA
tcttgtaggcctgcatcatca

SEQ ID NO: 5419 - RNA, 21 nt, synthetic construct
  source 1..21: mol_type = other RNA
tctttccggagcacttccttc

SEQ ID NO: 5420 - RNA, 21 nt, synthetic construct
  source 1..21: mol_type = other RNA
tctttgcctggacaccccgtt

SEQ ID NO: 5421 - RNA, 21 nt, synthetic construct
  source 1..21: mol_type = other RNA
tgaaaggagtgagaggtgacc

SEQ ID NO: 5422 - RNA, 21 nt, synthetic construct
  source 1..21: mol_type = other RNA
tgaacctgagccagctcccat

SEQ ID NO: 5423 - RNA, 21 nt, synthetic construct
  source 1..21: mol_type = other RNA
tgaagacggcatggggttggg

SEQ ID NO: 5424 - RNA, 21 nt, synthetic construct
  source 1..21: mol_type = other RNA
tgaagcggctccaattcggaa

SEQ ID NO: 5425 - RNA, 21 nt, synthetic construct
  source 1..21: mol_type = other RNA
tgaaggaggcggcagggaagg

SEQ ID NO: 5426 - RNA, 21 nt, synthetic construct
  source 1..21: mol_type = other RNA
tgacaatggccagggccaggc

SEQ ID NO: 5427 - RNA, 21 nt, synthetic construct
  source 1..21: mol_type = other RNA
tgacaccccgtcccagtcccc

SEQ ID NO: 5428 - RNA, 21 nt, synthetic construct
  source 1..21: mol_type = other RNA
tgaccactctgccccaggcct

SEQ ID NO: 5429 - RNA, 21 nt, synthetic construct
  source 1..21: mol_type = other RNA
tgacccaggccacaagctgca

SEQ ID NO: 5430 - RNA, 21 nt, synthetic construct
  source 1..21: mol_type = other RNA
tgacccatgcagtcctcctta

SEQ ID NO: 5431 - RNA, 21 nt, synthetic construct
  source 1..21: mol_type = other RNA
tgacccgaatccacaggagaa

SEQ ID NO: 5432 - RNA, 21 nt, synthetic construct
  source 1..21: mol_type = other RNA
tgacctgcattctctcccctg

SEQ ID NO: 5433 - RNA, 21 nt, synthetic construct
  source 1..21: mol_type = other RNA
tgagaggtgacccgaatccac

SEQ ID NO: 5434 - RNA, 21 nt, synthetic construct
  source 1..21: mol_type = other RNA
tgagccagctcccatagctca

SEQ ID NO: 5435 - RNA, 21 nt, synthetic construct
  source 1..21: mol_type = other RNA
tgagcccctccagccggtcct

SEQ ID NO: 5436 - RNA, 21 nt, synthetic construct
  source 1..21: mol_type = other RNA
tgagcggatcctccccgtgtc

SEQ ID NO: 5437 - RNA, 21 nt, synthetic construct
  source 1..21: mol_type = other RNA
tgagctatgggagctggctca

SEQ ID NO: 5438 - RNA, 21 nt, synthetic construct
  source 1..21: mol_type = other RNA
tgagctctactggcttctgcg

SEQ ID NO: 5439 - RNA, 21 nt, synthetic construct
  source 1..21: mol_type = other RNA
tgagggaggagagatgcccgg

SEQ ID NO: 5440 - RNA, 21 nt, synthetic construct
  source 1..21: mol_type = other RNA
tgagtccggaccactttgagc

SEQ ID NO: 5441 - RNA, 21 nt, synthetic construct
  source 1..21: mol_type = other RNA
tgatgatgcaggcctacaaga

SEQ ID NO: 5442 - RNA, 21 nt, synthetic construct
  source 1..21: mol_type = other RNA
tgatgcaggcctacaagaagg

SEQ ID NO: 5443 - RNA, 21 nt, synthetic construct
  source 1..21: mol_type = other RNA
tgatgtcctctgagcggatcc

SEQ ID NO: 5444 - RNA, 21 nt, synthetic construct
  source 1..21: mol_type = other RNA
tgcaccacgtgatgtcctctg

SEQ ID NO: 5445 - RNA, 21 nt, synthetic construct
  source 1..21: mol_type = other RNA
tgcagacagaaagcggcacag

SEQ ID NO: 5446 - RNA, 21 nt, synthetic construct
  source 1..21: mol_type = other RNA
tgcagcgccgagaaggaagtg

SEQ ID NO: 5447 - RNA, 21 nt, synthetic construct
  source 1..21: mol_type = other RNA
tgcagcttgtggcctgggtca

SEQ ID NO: 5448 - RNA, 21 nt, synthetic construct
  source 1..21: mol_type = other RNA
tgcaggcctacaagaagggga

SEQ ID NO: 5449 - RNA, 21 nt, synthetic construct
  source 1..21: mol_type = other RNA
tgcaggtcagagaaagcagga

SEQ ID NO: 5450 - RNA, 21 nt, synthetic construct
  source 1..21: mol_type = other RNA
tgcagtcctccttaccatccc

SEQ ID NO: 5451 - RNA, 21 nt, synthetic construct
  source 1..21: mol_type = other RNA
tgcatcatcaccgtttttctg

SEQ ID NO: 5452 - RNA, 21 nt, synthetic construct
  source 1..21: mol_type = other RNA
tgcatgggtcagcacaggctg

SEQ ID NO: 5453 - RNA, 21 nt, synthetic construct
  source 1..21: mol_type = other RNA
tgcattctctcccctgggcct

SEQ ID NO: 5454 - RNA, 21 nt, synthetic construct
  source 1..21: mol_type = other RNA
tgccaaagccagggccagtta

SEQ ID NO: 5455 - RNA, 21 nt, synthetic construct
  source 1..21: mol_type = other RNA
tgccaccctatgctgacaccc

SEQ ID NO: 5456 - RNA, 21 nt, synthetic construct
  source 1..21: mol_type = other RNA
tgccatctctcgtttcttagg

SEQ ID NO: 5457 - RNA, 21 nt, synthetic construct
  source 1..21: mol_type = other RNA
tgcccaaatgaaaggagtgag

SEQ ID NO: 5458 - RNA, 21 nt, synthetic construct
  source 1..21: mol_type = other RNA
tgcccaaggatgctctttccg

SEQ ID NO: 5459 - RNA, 21 nt, synthetic construct
  source 1..21: mol_type = other RNA
tgccccaggcctccttaccat

SEQ ID NO: 5460 - RNA, 21 nt, synthetic construct
  source 1..21: mol_type = other RNA
tgcccggagaggacccagaca

SEQ ID NO: 5461 - RNA, 21 nt, synthetic construct
  source 1..21: mol_type = other RNA
tgccctcctctcgcccccgag

SEQ ID NO: 5462 - RNA, 21 nt, synthetic construct
  source 1..21: mol_type = other RNA
tgccctctaacgctgccgtct

SEQ ID NO: 5463 - RNA, 21 nt, synthetic construct
  source 1..21: mol_type = other RNA
tgccctctcctgaacctgagc

SEQ ID NO: 5464 - RNA, 21 nt, synthetic construct
  source 1..21: mol_type = other RNA
tgccctgccctctcctgaacc

SEQ ID NO: 5465 - RNA, 21 nt, synthetic construct
  source 1..21: mol_type = other RNA
tgcccttgctgtgccgccgga

SEQ ID NO: 5466 - RNA, 21 nt, synthetic construct
  source 1..21: mol_type = other RNA
tgccgccggaactctgccctc

SEQ ID NO: 5467 - RNA, 21 nt, synthetic construct
  source 1..21: mol_type = other RNA
tgccgcctccttcaggttccg

SEQ ID NO: 5468 - RNA, 21 nt, synthetic construct
  source 1..21: mol_type = other RNA
tgccgctttctgtctgcagct

SEQ ID NO: 5469 - RNA, 21 nt, synthetic construct
  source 1..21: mol_type = other RNA
tgccgtctctctcctgagtcc

SEQ ID NO: 5470 - RNA, 21 nt, synthetic construct
  source 1..21: mol_type = other RNA
tgccgtcttcactcgctgggt

SEQ ID NO: 5471 - RNA, 21 nt, synthetic construct
  source 1..21: mol_type = other RNA
tgcctggacaccccgttctcc

SEQ ID NO: 5472 - RNA, 21 nt, synthetic construct
  source 1..21: mol_type = other RNA
tgcctggccctggccattgtc

SEQ ID NO: 5473 - RNA, 21 nt, synthetic construct
  source 1..21: mol_type = other RNA
tgcctgggaaggggaaacagt

SEQ ID NO: 5474 - RNA, 21 nt, synthetic construct
  source 1..21: mol_type = other RNA
tgcgccgcctctggcccactg

SEQ ID NO: 5475 - RNA, 21 nt, synthetic construct
  source 1..21: mol_type = other RNA
tgcgctgccctcctctcgccc

SEQ ID NO: 5476 - RNA, 21 nt, synthetic construct
  source 1..21: mol_type = other RNA
tgcggaagagagtaggtcgaa

SEQ ID NO: 5477 - RNA, 21 nt, synthetic construct
  source 1..21: mol_type = other RNA
tgcgtcccgcctccccttctt

SEQ ID NO: 5478 - RNA, 21 nt, synthetic construct
  source 1..21: mol_type = other RNA
tgctccggaaagagcatcctt

SEQ ID NO: 5479 - RNA, 21 nt, synthetic construct
  source 1..21: mol_type = other RNA
tgctctctgctgtgttgctgc

SEQ ID NO: 5480 - RNA, 21 nt, synthetic construct
  source 1..21: mol_type = other RNA
tgctctttccggagcacttcc

SEQ ID NO: 5481 - RNA, 21 nt, synthetic construct
  source 1..21: mol_type = other RNA
tgctgacaccccgtcccagtc

SEQ ID NO: 5482 - RNA, 21 nt, synthetic construct
  source 1..21: mol_type = other RNA
tgctgaccactctgccccagg

SEQ ID NO: 5483 - RNA, 21 nt, synthetic construct
  source 1..21: mol_type = other RNA
tgctgacccatgcagtcctcc

SEQ ID NO: 5484 - RNA, 21 nt, synthetic construct
  source 1..21: mol_type = other RNA
tgctgcccaaggatgctcttt

SEQ ID NO: 5485 - RNA, 21 nt, synthetic construct
  source 1..21: mol_type = other RNA
tgctgtgccgccggaactctg

SEQ ID NO: 5486 - RNA, 21 nt, synthetic construct
  source 1..21: mol_type = other RNA
tgctgtgttgctgcccaagga

SEQ ID NO: 5487 - RNA, 21 nt, synthetic construct
  source 1..21: mol_type = other RNA
tgctttctctgacctgcattc

SEQ ID NO: 5488 - RNA, 21 nt, synthetic construct
  source 1..21: mol_type = other RNA
tgctttctttgcctggacacc

SEQ ID NO: 5489 - RNA, 21 nt, synthetic construct
  source 1..21: mol_type = other RNA
tggacaaccccaaagtacccc

SEQ ID NO: 5490 - RNA, 21 nt, synthetic construct
  source 1..21: mol_type = other RNA
tggacaccccgttctcctgtg

SEQ ID NO: 5491 - RNA, 21 nt, synthetic construct
  source 1..21: mol_type = other RNA
tggactttgtctccttccctg

SEQ ID NO: 5492 - RNA, 21 nt, synthetic construct
  source 1..21: mol_type = other RNA
tggagaggtggctaaagccag

SEQ ID NO: 5493 - RNA, 21 nt, synthetic construct
  source 1..21: mol_type = other RNA
tggagccgcttcaactggccc

SEQ ID NO: 5494 - RNA, 21 nt, synthetic construct
  source 1..21: mol_type = other RNA
tggaggaagacggaacctgaa

SEQ ID NO: 5495 - RNA, 21 nt, synthetic construct
  source 1..21: mol_type = other RNA
tggaggggctcaacatcggaa

SEQ ID NO: 5496 - RNA, 21 nt, synthetic construct
  source 1..21: mol_type = other RNA
tggagtcgctttaactggccc

SEQ ID NO: 5497 - RNA, 21 nt, synthetic construct
  source 1..21: mol_type = other RNA
tggattcgggtcacctctcac

SEQ ID NO: 5498 - RNA, 21 nt, synthetic construct
  source 1..21: mol_type = other RNA
tggcaaagcccagggccagga

SEQ ID NO: 5499 - RNA, 21 nt, synthetic construct
  source 1..21: mol_type = other RNA
tggcacaggccccagaaggag

SEQ ID NO: 5500 - RNA, 21 nt, synthetic construct
  source 1..21: mol_type = other RNA
tggcagcctgtgctgacccat

SEQ ID NO: 5501 - RNA, 21 nt, synthetic construct
  source 1..21: mol_type = other RNA
tggccagggccaggcagatag

SEQ ID NO: 5502 - RNA, 21 nt, synthetic construct
  source 1..21: mol_type = other RNA
tggccattgtcactttgcgct

SEQ ID NO: 5503 - RNA, 21 nt, synthetic construct
  source 1..21: mol_type = other RNA
tggcccactgtttccccttcc

SEQ ID NO: 5504 - RNA, 21 nt, synthetic construct
  source 1..21: mol_type = other RNA
tggcccagatccttccctgcc

SEQ ID NO: 5505 - RNA, 21 nt, synthetic construct
  source 1..21: mol_type = other RNA
tggccctggccattgtcactt

SEQ ID NO: 5506 - RNA, 21 nt, synthetic construct
  source 1..21: mol_type = other RNA
tggccctggctttggcagcct

SEQ ID NO: 5507 - RNA, 21 nt, synthetic construct
  source 1..21: mol_type = other RNA
tggccctgggcttagccactc

SEQ ID NO: 5508 - RNA, 21 nt, synthetic construct
  source 1..21: mol_type = other RNA
tggccctgggctttgccaccc

SEQ ID NO: 5509 - RNA, 21 nt, synthetic construct
  source 1..21: mol_type = other RNA
tggcctgggtcacctctacgg

SEQ ID NO: 5510 - RNA, 21 nt, synthetic construct
  source 1..21: mol_type = other RNA
tggccttctccgacggatgtc

SEQ ID NO: 5511 - RNA, 21 nt, synthetic construct
  source 1..21: mol_type = other RNA
tggctaaagccagggagacgg

SEQ ID NO: 5512 - RNA, 21 nt, synthetic construct
  source 1..21: mol_type = other RNA
tggctaagcccagggccagtt

SEQ ID NO: 5513 - RNA, 21 nt, synthetic construct
  source 1..21: mol_type = other RNA
tggctcaggttcaggagaggg

SEQ ID NO: 5514 - RNA, 21 nt, synthetic construct
  source 1..21: mol_type = other RNA
tggcttctgcgccgcctctgg

SEQ ID NO: 5515 - RNA, 21 nt, synthetic construct
  source 1..21: mol_type = other RNA
tggctttagccacctctccat

SEQ ID NO: 5516 - RNA, 21 nt, synthetic construct
  source 1..21: mol_type = other RNA
tggctttggcagcctgtgctg

SEQ ID NO: 5517 - RNA, 21 nt, synthetic construct
  source 1..21: mol_type = other RNA
tgggaaggggaaacagtgggc

SEQ ID NO: 5518 - RNA, 21 nt, synthetic construct
  source 1..21: mol_type = other RNA
tgggacggggtgtcagcatag

SEQ ID NO: 5519 - RNA, 21 nt, synthetic construct
  source 1..21: mol_type = other RNA
tgggagctggctcaggttcag

SEQ ID NO: 5520 - RNA, 21 nt, synthetic construct
  source 1..21: mol_type = other RNA
tgggcagcaacacagcagaga

SEQ ID NO: 5521 - RNA, 21 nt, synthetic construct
  source 1..21: mol_type = other RNA
tgggcagctcccctacccccc

SEQ ID NO: 5522 - RNA, 21 nt, synthetic construct
  source 1..21: mol_type = other RNA
tgggccagaggcggcgcagaa

SEQ ID NO: 5523 - RNA, 21 nt, synthetic construct
  source 1..21: mol_type = other RNA
tgggccagccgtagaggtgac

SEQ ID NO: 5524 - RNA, 21 nt, synthetic construct
  source 1..21: mol_type = other RNA
tgggcctgtgccgctttctgt

SEQ ID NO: 5525 - RNA, 21 nt, synthetic construct
  source 1..21: mol_type = other RNA
tgggcttagccactctgtgct

SEQ ID NO: 5526 - RNA, 21 nt, synthetic construct
  source 1..21: mol_type = other RNA
tgggctttgccaccctatgct

SEQ ID NO: 5527 - RNA, 21 nt, synthetic construct
  source 1..21: mol_type = other RNA
tggggcagagtggtcagcaca

SEQ ID NO: 5528 - RNA, 21 nt, synthetic construct
  source 1..21: mol_type = other RNA
tggggcctgtgccatctctcg

SEQ ID NO: 5529 - RNA, 21 nt, synthetic construct
  source 1..21: mol_type = other RNA
tggggtggtcgaaggggaatg

SEQ ID NO: 5530 - RNA, 21 nt, synthetic construct
  source 1..21: mol_type = other RNA
tggggttgggtgagggaggag

SEQ ID NO: 5531 - RNA, 21 nt, synthetic construct
  source 1..21: mol_type = other RNA
tggggttgtccagaaaaacgg

SEQ ID NO: 5532 - RNA, 21 nt, synthetic construct
  source 1..21: mol_type = other RNA
tgggtcacctctacggctggc

SEQ ID NO: 5533 - RNA, 21 nt, synthetic construct
  source 1..21: mol_type = other RNA
tgggtcagcacaggctgccaa

SEQ ID NO: 5534 - RNA, 21 nt, synthetic construct
  source 1..21: mol_type = other RNA
tgggtcctctccgggcatctc

SEQ ID NO: 5535 - RNA, 21 nt, synthetic construct
  source 1..21: mol_type = other RNA
tgggtgagggaggagagatgc

SEQ ID NO: 5536 - RNA, 21 nt, synthetic construct
  source 1..21: mol_type = other RNA
tgggttcccttttccttctcc

SEQ ID NO: 5537 - RNA, 21 nt, synthetic construct
  source 1..21: mol_type = other RNA
tggtaaggaggactgcatggg

SEQ ID NO: 5538 - RNA, 21 nt, synthetic construct
  source 1..21: mol_type = other RNA
tggtaaggaggcctggggcag

SEQ ID NO: 5539 - RNA, 21 nt, synthetic construct
  source 1..21: mol_type = other RNA
tggtaagggggactgggacgg

SEQ ID NO: 5540 - RNA, 21 nt, synthetic construct
  source 1..21: mol_type = other RNA
tggtcagcacagagtggctaa

SEQ ID NO: 5541 - RNA, 21 nt, synthetic construct
  source 1..21: mol_type = other RNA
tggtccggactcaggagagag

SEQ ID NO: 5542 - RNA, 21 nt, synthetic construct
  source 1..21: mol_type = other RNA
tggtcgaaggggaatggtaag

SEQ ID NO: 5543 - RNA, 21 nt, synthetic construct
  source 1..21: mol_type = other RNA
tggtctatctgcctggccctg

SEQ ID NO: 5544 - RNA, 21 nt, synthetic construct
  source 1..21: mol_type = other RNA
tggtgcagcgccgagaaggaa

SEQ ID NO: 5545 - RNA, 21 nt, synthetic construct
  source 1..21: mol_type = other RNA
tgtaggcctgcatcatcaccg

SEQ ID NO: 5546 - RNA, 21 nt, synthetic construct
  source 1..21: mol_type = other RNA
tgtcactttgcgctgccctcc

SEQ ID NO: 5547 - RNA, 21 nt, synthetic construct
  source 1..21: mol_type = other RNA
tgtcagcatagggtggcaaag

SEQ ID NO: 5548 - RNA, 21 nt, synthetic construct
  source 1..21: mol_type = other RNA
tgtccagaaaaacggtgatga

SEQ ID NO: 5549 - RNA, 21 nt, synthetic construct
  source 1..21: mol_type = other RNA
tgtccaggcaaagaaagcaag

SEQ ID NO: 5550 - RNA, 21 nt, synthetic construct
  source 1..21: mol_type = other RNA
tgtcctctgagcggatcctcc

SEQ ID NO: 5551 - RNA, 21 nt, synthetic construct
  source 1..21: mol_type = other RNA
tgtctcccttgcgtcccgcct

SEQ ID NO: 5552 - RNA, 21 nt, synthetic construct
  source 1..21: mol_type = other RNA
tgtctccttccctgccctgcc

SEQ ID NO: 5553 - RNA, 21 nt, synthetic construct
  source 1..21: mol_type = other RNA
tgtctgcagcttgtggcctgg

SEQ ID NO: 5554 - RNA, 21 nt, synthetic construct
  source 1..21: mol_type = other RNA
tgtctgggtcctctccgggca

SEQ ID NO: 5555 - RNA, 21 nt, synthetic construct
  source 1..21: mol_type = other RNA
tgtgccatctctcgtttctta

SEQ ID NO: 5556 - RNA, 21 nt, synthetic construct
  source 1..21: mol_type = other RNA
tgtgccgccggaactctgccc

SEQ ID NO: 5557 - RNA, 21 nt, synthetic construct
  source 1..21: mol_type = other RNA
tgtgccgctttctgtctgcag

SEQ ID NO: 5558 - RNA, 21 nt, synthetic construct
  source 1..21: mol_type = other RNA
tgtgctgaccactctgcccca

SEQ ID NO: 5559 - RNA, 21 nt, synthetic construct
  source 1..21: mol_type = other RNA
tgtgctgacccatgcagtcct

SEQ ID NO: 5560 - RNA, 21 nt, synthetic construct
  source 1..21: mol_type = other RNA
tgtggattcgggtcacctctc

SEQ ID NO: 5561 - RNA, 21 nt, synthetic construct
  source 1..21: mol_type = other RNA
tgtggcctgggtcacctctac

SEQ ID NO: 5562 - RNA, 21 nt, synthetic construct
  source 1..21: mol_type = other RNA
tgtgttgctgcccaaggatgc

SEQ ID NO: 5563 - RNA, 21 nt, synthetic construct
  source 1..21: mol_type = other RNA
tgttgagcccctccagccggt

SEQ ID NO: 5564 - RNA, 21 nt, synthetic construct
  source 1..21: mol_type = other RNA
tgttgctgcccaaggatgctc

SEQ ID NO: 5565 - RNA, 21 nt, synthetic construct
  source 1..21: mol_type = other RNA
tgtttccccttcccaggcagg

SEQ ID NO: 5566 - RNA, 21 nt, synthetic construct
  source 1..21: mol_type = other RNA
ttaaagcgactccaatgcgga

SEQ ID NO: 5567 - RNA, 21 nt, synthetic construct
  source 1..21: mol_type = other RNA
ttaactggccctggctttggc

SEQ ID NO: 5568 - RNA, 21 nt, synthetic construct
  source 1..21: mol_type = other RNA
ttaccatccctccctcgactt

SEQ ID NO: 5569 - RNA, 21 nt, synthetic construct
  source 1..21: mol_type = other RNA
ttaccattccccttcgaccac

SEQ ID NO: 5570 - RNA, 21 nt, synthetic construct
  source 1..21: mol_type = other RNA
ttaccattccccttcgaccta

SEQ ID NO: 5571 - RNA, 21 nt, synthetic construct
  source 1..21: mol_type = other RNA
ttagagggcagagttccggcg

SEQ ID NO: 5572 - RNA, 21 nt, synthetic construct
  source 1..21: mol_type = other RNA
ttagccacctctccatcctct

SEQ ID NO: 5573 - RNA, 21 nt, synthetic construct
  source 1..21: mol_type = other RNA
ttagccactctgtgctgacca

SEQ ID NO: 5574 - RNA, 21 nt, synthetic construct
  source 1..21: mol_type = other RNA
ttaggatggccttctccgacg

SEQ ID NO: 5575 - RNA, 21 nt, synthetic construct
  source 1..21: mol_type = other RNA
ttcaactggccctgggcttag

SEQ ID NO: 5576 - RNA, 21 nt, synthetic construct
  source 1..21: mol_type = other RNA
ttcactcgctgggttcccttt

SEQ ID NO: 5577 - RNA, 21 nt, synthetic construct
  source 1..21: mol_type = other RNA
ttcaggagagggcagggcagg

SEQ ID NO: 5578 - RNA, 21 nt, synthetic construct
  source 1..21: mol_type = other RNA
ttcaggttccgtcttcctcca

SEQ ID NO: 5579 - RNA, 21 nt, synthetic construct
  source 1..21: mol_type = other RNA
ttcatttgggcagctccccta

SEQ ID NO: 5580 - RNA, 21 nt, synthetic construct
  source 1..21: mol_type = other RNA
ttcccaggcaggtcctgcttt

SEQ ID NO: 5581 - RNA, 21 nt, synthetic construct
  source 1..21: mol_type = other RNA
ttcccctcttccgatgttgag

SEQ ID NO: 5582 - RNA, 21 nt, synthetic construct
  source 1..21: mol_type = other RNA
ttccccttcccaggcaggtcc

SEQ ID NO: 5583 - RNA, 21 nt, synthetic construct
  source 1..21: mol_type = other RNA
ttccccttcgaccaccccact

SEQ ID NO: 5584 - RNA, 21 nt, synthetic construct
  source 1..21: mol_type = other RNA
ttccccttcgacctactctct

SEQ ID NO: 5585 - RNA, 21 nt, synthetic construct
  source 1..21: mol_type = other RNA
ttccccttgctctctgctgtg

SEQ ID NO: 5586 - RNA, 21 nt, synthetic construct
  source 1..21: mol_type = other RNA
ttccctgccctgccctctcct

SEQ ID NO: 5587 - RNA, 21 nt, synthetic construct
  source 1..21: mol_type = other RNA
ttccctgccgcctccttcagg

SEQ ID NO: 5588 - RNA, 21 nt, synthetic construct
  source 1..21: mol_type = other RNA
ttcccttttccttctccttct

SEQ ID NO: 5589 - RNA, 21 nt, synthetic construct
  source 1..21: mol_type = other RNA
ttccgaattggagccgcttca

SEQ ID NO: 5590 - RNA, 21 nt, synthetic construct
  source 1..21: mol_type = other RNA
ttccgatgttgagcccctcca

SEQ ID NO: 5591 - RNA, 21 nt, synthetic construct
  source 1..21: mol_type = other RNA
ttccgcattggagtcgcttta

SEQ ID NO: 5592 - RNA, 21 nt, synthetic construct
  source 1..21: mol_type = other RNA
ttccggagcacttccttctcg

SEQ ID NO: 5593 - RNA, 21 nt, synthetic construct
  source 1..21: mol_type = other RNA
ttccggcggcacagcaagggc

SEQ ID NO: 5594 - RNA, 21 nt, synthetic construct
  source 1..21: mol_type = other RNA
ttccgtcttcctccactccct

SEQ ID NO: 5595 - RNA, 21 nt, synthetic construct
  source 1..21: mol_type = other RNA
ttcctccactccctcttcccc

SEQ ID NO: 5596 - RNA, 21 nt, synthetic construct
  source 1..21: mol_type = other RNA
ttcctggccctgggctttgcc

SEQ ID NO: 5597 - RNA, 21 nt, synthetic construct
  source 1..21: mol_type = other RNA
ttccttctccttctggggcct

SEQ ID NO: 5598 - RNA, 21 nt, synthetic construct
  source 1..21: mol_type = other RNA
ttccttctcggcgctgcacca

SEQ ID NO: 5599 - RNA, 21 nt, synthetic construct
  source 1..21: mol_type = other RNA
ttcgaccaccccacttccgaa

SEQ ID NO: 5600 - RNA, 21 nt, synthetic construct
  source 1..21: mol_type = other RNA
ttcgacctactctcttccgca

SEQ ID NO: 5601 - RNA, 21 nt, synthetic construct
  source 1..21: mol_type = other RNA
ttcggaagtggggtggtcgaa

SEQ ID NO: 5602 - RNA, 21 nt, synthetic construct
  source 1..21: mol_type = other RNA
ttcgggtcacctctcactcct

SEQ ID NO: 5603 - RNA, 21 nt, synthetic construct
  source 1..21: mol_type = other RNA
ttctccgacggatgtctccct

SEQ ID NO: 5604 - RNA, 21 nt, synthetic construct
  source 1..21: mol_type = other RNA
ttctcctgtggattcgggtca

SEQ ID NO: 5605 - RNA, 21 nt, synthetic construct
  source 1..21: mol_type = other RNA
ttctccttctggggcctgtgc

SEQ ID NO: 5606 - RNA, 21 nt, synthetic construct
  source 1..21: mol_type = other RNA
ttctcggcgctgcaccacgtg

SEQ ID NO: 5607 - RNA, 21 nt, synthetic construct
  source 1..21: mol_type = other RNA
ttctctcccctgggcctgtgc

SEQ ID NO: 5608 - RNA, 21 nt, synthetic construct
  source 1..21: mol_type = other RNA
ttctctgacctgcattctctc

SEQ ID NO: 5609 - RNA, 21 nt, synthetic construct
  source 1..21: mol_type = other RNA
ttctgcgccgcctctggccca

SEQ ID NO: 5610 - RNA, 21 nt, synthetic construct
  source 1..21: mol_type = other RNA
ttctggacaaccccaaagtac

SEQ ID NO: 5611 - RNA, 21 nt, synthetic construct
  source 1..21: mol_type = other RNA
ttctggggcctgtgccatctc

SEQ ID NO: 5612 - RNA, 21 nt, synthetic construct
  source 1..21: mol_type = other RNA
ttctgtctgcagcttgtggcc

SEQ ID NO: 5613 - RNA, 21 nt, synthetic construct
  source 1..21: mol_type = other RNA
ttcttaggatggccttctccg

SEQ ID NO: 5614 - RNA, 21 nt, synthetic construct
  source 1..21: mol_type = other RNA
ttcttgtaggcctgcatcatc

SEQ ID NO: 5615 - RNA, 21 nt, synthetic construct
  source 1..21: mol_type = other RNA
ttctttgcctggacaccccgt

SEQ ID NO: 5616 - RNA, 21 nt, synthetic construct
  source 1..21: mol_type = other RNA
ttgaagcggctccaattcgga

SEQ ID NO: 5617 - RNA, 21 nt, synthetic construct
  source 1..21: mol_type = other RNA
ttgagcccctccagccggtcc

SEQ ID NO: 5618 - RNA, 21 nt, synthetic construct
  source 1..21: mol_type = other RNA
ttgagctctactggcttctgc

SEQ ID NO: 5619 - RNA, 21 nt, synthetic construct
  source 1..21: mol_type = other RNA
ttgccaccctatgctgacacc

SEQ ID NO: 5620 - RNA, 21 nt, synthetic construct
  source 1..21: mol_type = other RNA
ttgcctggacaccccgttctc

SEQ ID NO: 5621 - RNA, 21 nt, synthetic construct
  source 1..21: mol_type = other RNA
ttgcgctgccctcctctcgcc

SEQ ID NO: 5622 - RNA, 21 nt, synthetic construct
  source 1..21: mol_type = other RNA
ttgcgtcccgcctccccttct

SEQ ID NO: 5623 - RNA, 21 nt, synthetic construct
  source 1..21: mol_type = other RNA
ttgctctctgctgtgttgctg

SEQ ID NO: 5624 - RNA, 21 nt, synthetic construct
  source 1..21: mol_type = other RNA
ttgctgcccaaggatgctctt

SEQ ID NO: 5625 - RNA, 21 nt, synthetic construct
  source 1..21: mol_type = other RNA
ttgctgtgccgccggaactct

SEQ ID NO: 5626 - RNA, 21 nt, synthetic construct
  source 1..21: mol_type = other RNA
ttgctttctttgcctggacac

SEQ ID NO: 5627 - RNA, 21 nt, synthetic construct
  source 1..21: mol_type = other RNA
ttggagccgcttcaactggcc

SEQ ID NO: 5628 - RNA, 21 nt, synthetic construct
  source 1..21: mol_type = other RNA
ttggagtcgctttaactggcc

SEQ ID NO: 5629 - RNA, 21 nt, synthetic construct
  source 1..21: mol_type = other RNA
ttggcagcctgtgctgaccca

SEQ ID NO: 5630 - RNA, 21 nt, synthetic construct
  source 1..21: mol_type = other RNA
ttgggcagcaacacagcagag

SEQ ID NO: 5631 - RNA, 21 nt, synthetic construct
  source 1..21: mol_type = other RNA
ttgggcagctcccctaccccc

SEQ ID NO: 5632 - RNA, 21 nt, synthetic construct
  source 1..21: mol_type = other RNA
ttggggttgtccagaaaaacg

SEQ ID NO: 5633 - RNA, 21 nt, synthetic construct
  source 1..21: mol_type = other RNA
ttgggtgagggaggagagatg

SEQ ID NO: 5634 - RNA, 21 nt, synthetic construct
  source 1..21: mol_type = other RNA
ttgtaggcctgcatcatcacc

SEQ ID NO: 5635 - RNA, 21 nt, synthetic construct
  source 1..21: mol_type = other RNA
ttgtcactttgcgctgccctc

SEQ ID NO: 5636 - RNA, 21 nt, synthetic construct
  source 1..21: mol_type = other RNA
ttgtccagaaaaacggtgatg

SEQ ID NO: 5637 - RNA, 21 nt, synthetic construct
  source 1..21: mol_type = other RNA
ttgtctccttccctgccctgc

SEQ ID NO: 5638 - RNA, 21 nt, synthetic construct
  source 1..21: mol_type = other RNA
ttgtggcctgggtcacctcta

SEQ ID NO: 5639 - RNA, 21 nt, synthetic construct
  source 1..21: mol_type = other RNA
tttaactggccctggctttgg

SEQ ID NO: 5640 - RNA, 21 nt, synthetic construct
  source 1..21: mol_type = other RNA
tttagccacctctccatcctc

SEQ ID NO: 5641 - RNA, 21 nt, synthetic construct
  source 1..21: mol_type = other RNA
tttcatttgggcagctcccct

SEQ ID NO: 5642 - RNA, 21 nt, synthetic construct
  source 1..21: mol_type = other RNA
tttccccttcccaggcaggtc

SEQ ID NO: 5643 - RNA, 21 nt, synthetic construct
  source 1..21: mol_type = other RNA
tttccggagcacttccttctc

SEQ ID NO: 5644 - RNA, 21 nt, synthetic construct
  source 1..21: mol_type = other RNA
tttccttctccttctggggcc

SEQ ID NO: 5645 - RNA, 21 nt, synthetic construct
  source 1..21: mol_type = other RNA
tttctctgacctgcattctct

SEQ ID NO: 5646 - RNA, 21 nt, synthetic construct
  source 1..21: mol_type = other RNA
tttctggacaaccccaaagta

SEQ ID NO: 5647 - RNA, 21 nt, synthetic construct
  source 1..21: mol_type = other RNA
tttctgtctgcagcttgtggc

SEQ ID NO: 5648 - RNA, 21 nt, synthetic construct
  source 1..21: mol_type = other RNA
tttcttaggatggccttctcc

SEQ ID NO: 5649 - RNA, 21 nt, synthetic construct
  source 1..21: mol_type = other RNA
tttctttgcctggacaccccg

SEQ ID NO: 5650 - RNA, 21 nt, synthetic construct
  source 1..21: mol_type = other RNA
tttgagctctactggcttctg

SEQ ID NO: 5651 - RNA, 21 nt, synthetic construct
  source 1..21: mol_type = other RNA
tttgccaccctatgctgacac

SEQ ID NO: 5652 - RNA, 21 nt, synthetic construct
  source 1..21: mol_type = other RNA
tttgcctggacaccccgttct

SEQ ID NO: 5653 - RNA, 21 nt, synthetic construct
  source 1..21: mol_type = other RNA
tttgcgctgccctcctctcgc

SEQ ID NO: 5654 - RNA, 21 nt, synthetic construct
  source 1..21: mol_type = other RNA
tttggcagcctgtgctgaccc

SEQ ID NO: 5655 - RNA, 21 nt, synthetic construct
  source 1..21: mol_type = other RNA
tttgggcagctcccctacccc

SEQ ID NO: 5656 - RNA, 21 nt, synthetic construct
  source 1..21: mol_type = other RNA
tttggggttgtccagaaaaac

SEQ ID NO: 5657 - RNA, 21 nt, synthetic construct
  source 1..21: mol_type = other RNA
tttgtctccttccctgccctg

SEQ ID NO: 5658 - RNA, 21 nt, synthetic construct
  source 1..21: mol_type = other RNA
ttttccttctccttctggggc

SEQ ID NO: 5659 - RNA, 21 nt, synthetic construct
  source 1..21: mol_type = other RNA
ttttctggacaaccccaaagt

SEQ ID NO: 5660 - RNA, 21 nt, synthetic construct
  source 1..21: mol_type = other RNA
tttttctggacaaccccaaag

SEQ ID NO: 5661 - RNA, 22 nt, synthetic construct
  source 1..22: mol_type = other RNA
aaaaacggtgatgatgcaggcc

SEQ ID NO: 5662 - RNA, 22 nt, synthetic construct
  source 1..22: mol_type = other RNA
aaaacggtgatgatgcaggcct

SEQ ID NO: 5663 - RNA, 22 nt, synthetic construct
  source 1..22: mol_type = other RNA
aaaagggaacccagcgagtgaa

SEQ ID NO: 5664 - RNA, 22 nt, synthetic construct
  source 1..22: mol_type = other RNA
aaacagtgggccagaggcggcg

SEQ ID NO: 5665 - RNA, 22 nt, synthetic construct
  source 1..22: mol_type = other RNA
aaacgagagatggcacaggccc

SEQ ID NO: 5666 - RNA, 22 nt, synthetic construct
  source 1..22: mol_type = other RNA
aaacggtgatgatgcaggccta

SEQ ID NO: 5667 - RNA, 22 nt, synthetic construct
  source 1..22: mol_type = other RNA
aaagaaagcaagaggatggaga

SEQ ID NO: 5668 - RNA, 22 nt, synthetic construct
  source 1..22: mol_type = other RNA
aaagagcatccttgggcagcaa

SEQ ID NO: 5669 - RNA, 22 nt, synthetic construct
  source 1..22: mol_type = other RNA
aaagcaagaggatggagaggtg

SEQ ID NO: 5670 - RNA, 22 nt, synthetic construct
  source 1..22: mol_type = other RNA
aaagcaggacctgcctgggaag

SEQ ID NO: 5671 - RNA, 22 nt, synthetic construct
  source 1..22: mol_type = other RNA
aaagccagggagacggggtact

SEQ ID NO: 5672 - RNA, 22 nt, synthetic construct
  source 1..22: mol_type = other RNA
aaagccagggccagttaaagcg

SEQ ID NO: 5673 - RNA, 22 nt, synthetic construct
  source 1..22: mol_type = other RNA
aaagcgactccaatgcggaaga

SEQ ID NO: 5674 - RNA, 22 nt, synthetic construct
  source 1..22: mol_type = other RNA
aaagcggcacaggcccagggga

SEQ ID NO: 5675 - RNA, 22 nt, synthetic construct
  source 1..22: mol_type = other RNA
aaaggagtgagaggtgacccga

SEQ ID NO: 5676 - RNA, 22 nt, synthetic construct
  source 1..22: mol_type = other RNA
aaagggaacccagcgagtgaag

SEQ ID NO: 5677 - RNA, 22 nt, synthetic construct
  source 1..22: mol_type = other RNA
aaagtaccccgtctccctggct

SEQ ID NO: 5678 - RNA, 22 nt, synthetic construct
  source 1..22: mol_type = other RNA
aaagtccaggaccggctggagg

SEQ ID NO: 5679 - RNA, 22 nt, synthetic construct
  source 1..22: mol_type = other RNA
aaagtgacaatggccagggcca

SEQ ID NO: 5680 - RNA, 22 nt, synthetic construct
  source 1..22: mol_type = other RNA
aaagtggtccggactcaggaga

SEQ ID NO: 5681 - RNA, 22 nt, synthetic construct
  source 1..22: mol_type = other RNA
aaatgaaaggagtgagaggtga

SEQ ID NO: 5682 - RNA, 22 nt, synthetic construct
  source 1..22: mol_type = other RNA
aacacagcagagagcaagggga

SEQ ID NO: 5683 - RNA, 22 nt, synthetic construct
  source 1..22: mol_type = other RNA
aacagtgggccagaggcggcgc

SEQ ID NO: 5684 - RNA, 22 nt, synthetic construct
  source 1..22: mol_type = other RNA
aacatcggaagaggggaagtcg

SEQ ID NO: 5685 - RNA, 22 nt, synthetic construct
  source 1..22: mol_type = other RNA
aacccagcgagtgaagacggca

SEQ ID NO: 5686 - RNA, 22 nt, synthetic construct
  source 1..22: mol_type = other RNA
aaccccaaagtaccccgtctcc

SEQ ID NO: 5687 - RNA, 22 nt, synthetic construct
  source 1..22: mol_type = other RNA
aaccccatgccgtcttcactcg

SEQ ID NO: 5688 - RNA, 22 nt, synthetic construct
  source 1..22: mol_type = other RNA
aacctgaaggaggcggcaggga

SEQ ID NO: 5689 - RNA, 22 nt, synthetic construct
  source 1..22: mol_type = other RNA
aacctgagccagctcccatagc

SEQ ID NO: 5690 - RNA, 22 nt, synthetic construct
  source 1..22: mol_type = other RNA
aacgagagatggcacaggcccc

SEQ ID NO: 5691 - RNA, 22 nt, synthetic construct
  source 1..22: mol_type = other RNA
aacgctgccgtctctctcctga

SEQ ID NO: 5692 - RNA, 22 nt, synthetic construct
  source 1..22: mol_type = other RNA
aacggggtgtccaggcaaagaa

SEQ ID NO: 5693 - RNA, 22 nt, synthetic construct
  source 1..22: mol_type = other RNA
aacggtgatgatgcaggcctac

SEQ ID NO: 5694 - RNA, 22 nt, synthetic construct
  source 1..22: mol_type = other RNA
aactctgccctctaacgctgcc

SEQ ID NO: 5695 - RNA, 22 nt, synthetic construct
  source 1..22: mol_type = other RNA
aactggccctggctttggcagc

SEQ ID NO: 5696 - RNA, 22 nt, synthetic construct
  source 1..22: mol_type = other RNA
aactggccctgggcttagccac

SEQ ID NO: 5697 - RNA, 22 nt, synthetic construct
  source 1..22: mol_type = other RNA
aagaaacgagagatggcacagg

SEQ ID NO: 5698 - RNA, 22 nt, synthetic construct
  source 1..22: mol_type = other RNA
aagaaagcaagaggatggagag

SEQ ID NO: 5699 - RNA, 22 nt, synthetic construct
  source 1..22: mol_type = other RNA
aagaaggggaggcgggacgcaa

SEQ ID NO: 5700 - RNA, 22 nt, synthetic construct
  source 1..22: mol_type = other RNA
aagacggaacctgaaggaggcg

SEQ ID NO: 5701 - RNA, 22 nt, synthetic construct
  source 1..22: mol_type = other RNA
aagacggcatggggttgggtga

SEQ ID NO: 5702 - RNA, 22 nt, synthetic construct
  source 1..22: mol_type = other RNA
aagagagtaggtcgaaggggaa

SEQ ID NO: 5703 - RNA, 22 nt, synthetic construct
  source 1..22: mol_type = other RNA
aagagcatccttgggcagcaac

SEQ ID NO: 5704 - RNA, 22 nt, synthetic construct
  source 1..22: mol_type = other RNA
aagaggatggagaggtggctaa

SEQ ID NO: 5705 - RNA, 22 nt, synthetic construct
  source 1..22: mol_type = other RNA
aagagggagtggaggaagacgg

SEQ ID NO: 5706 - RNA, 22 nt, synthetic construct
  source 1..22: mol_type = other RNA
aagaggggaagtcgagggaggg

SEQ ID NO: 5707 - RNA, 22 nt, synthetic construct
  source 1..22: mol_type = other RNA
aagcaagaggatggagaggtgg

SEQ ID NO: 5708 - RNA, 22 nt, synthetic construct
  source 1..22: mol_type = other RNA
aagcaggacctgcctgggaagg

SEQ ID NO: 5709 - RNA, 22 nt, synthetic construct
  source 1..22: mol_type = other RNA
aagccagggagacggggtactt

SEQ ID NO: 5710 - RNA, 22 nt, synthetic construct
  source 1..22: mol_type = other RNA
aagccagggccagttaaagcga

SEQ ID NO: 5711 - RNA, 22 nt, synthetic construct
  source 1..22: mol_type = other RNA
aagccagtagagctcaaagtgg

SEQ ID NO: 5712 - RNA, 22 nt, synthetic construct
  source 1..22: mol_type = other RNA
aagcccagggccagttgaagcg

SEQ ID NO: 5713 - RNA, 22 nt, synthetic construct
  source 1..22: mol_type = other RNA
aagcgactccaatgcggaagag

SEQ ID NO: 5714 - RNA, 22 nt, synthetic construct
  source 1..22: mol_type = other RNA
aagcggcacaggcccaggggag

SEQ ID NO: 5715 - RNA, 22 nt, synthetic construct
  source 1..22: mol_type = other RNA
aagcggctccaattcggaagtg

SEQ ID NO: 5716 - RNA, 22 nt, synthetic construct
  source 1..22: mol_type = other RNA
aagctgcagacagaaagcggca

SEQ ID NO: 5717 - RNA, 22 nt, synthetic construct
  source 1..22: mol_type = other RNA
aaggaaaagggaacccagcgag

SEQ ID NO: 5718 - RNA, 22 nt, synthetic construct
  source 1..22: mol_type = other RNA
aaggaagtgctccggaaagagc

SEQ ID NO: 5719 - RNA, 22 nt, synthetic construct
  source 1..22: mol_type = other RNA
aaggagaaggaaaagggaaccc

SEQ ID NO: 5720 - RNA, 22 nt, synthetic construct
  source 1..22: mol_type = other RNA
aaggagacaaagtccaggaccg

SEQ ID NO: 5721 - RNA, 22 nt, synthetic construct
  source 1..22: mol_type = other RNA
aaggaggactgcatgggtcagc

SEQ ID NO: 5722 - RNA, 22 nt, synthetic construct
  source 1..22: mol_type = other RNA
aaggaggcctggggcagagtgg

SEQ ID NO: 5723 - RNA, 22 nt, synthetic construct
  source 1..22: mol_type = other RNA
aaggaggcggcagggaaggatc

SEQ ID NO: 5724 - RNA, 22 nt, synthetic construct
  source 1..22: mol_type = other RNA
aaggagtgagaggtgacccgaa

SEQ ID NO: 5725 - RNA, 22 nt, synthetic construct
  source 1..22: mol_type = other RNA
aaggatctgggccagccgtaga

SEQ ID NO: 5726 - RNA, 22 nt, synthetic construct
  source 1..22: mol_type = other RNA
aaggatgctctttccggagcac

SEQ ID NO: 5727 - RNA, 22 nt, synthetic construct
  source 1..22: mol_type = other RNA
aaggccatcctaagaaacgaga

SEQ ID NO: 5728 - RNA, 22 nt, synthetic construct
  source 1..22: mol_type = other RNA
aagggaacccagcgagtgaaga

SEQ ID NO: 5729 - RNA, 22 nt, synthetic construct
  source 1..22: mol_type = other RNA
aagggagacatccgtcggagaa

SEQ ID NO: 5730 - RNA, 22 nt, synthetic construct
  source 1..22: mol_type = other RNA
aagggcactcgggggcgagagg

SEQ ID NO: 5731 - RNA, 22 nt, synthetic construct
  source 1..22: mol_type = other RNA
aaggggaaacagtgggccagag

SEQ ID NO: 5732 - RNA, 22 nt, synthetic construct
  source 1..22: mol_type = other RNA
aaggggaagagggagtggagga

SEQ ID NO: 5733 - RNA, 22 nt, synthetic construct
  source 1..22: mol_type = other RNA
aaggggaatggtaaggaggcct

SEQ ID NO: 5734 - RNA, 22 nt, synthetic construct
  source 1..22: mol_type = other RNA
aaggggaatggtaagggggact

SEQ ID NO: 5735 - RNA, 22 nt, synthetic construct
  source 1..22: mol_type = other RNA
aaggggaggcgggacgcaaggg

SEQ ID NO: 5736 - RNA, 22 nt, synthetic construct
  source 1..22: mol_type = other RNA
aagggggactgggacggggtgt

SEQ ID NO: 5737 - RNA, 22 nt, synthetic construct
  source 1..22: mol_type = other RNA
aaggggggtaggggagctgccc

SEQ ID NO: 5738 - RNA, 22 nt, synthetic construct
  source 1..22: mol_type = other RNA
aagtaccccgtctccctggctt

SEQ ID NO: 5739 - RNA, 22 nt, synthetic construct
  source 1..22: mol_type = other RNA
aagtccaggaccggctggaggg

SEQ ID NO: 5740 - RNA, 22 nt, synthetic construct
  source 1..22: mol_type = other RNA
aagtcgagggagggatggtaag

SEQ ID NO: 5741 - RNA, 22 nt, synthetic construct
  source 1..22: mol_type = other RNA
aagtgacaatggccagggccag

SEQ ID NO: 5742 - RNA, 22 nt, synthetic construct
  source 1..22: mol_type = other RNA
aagtgctccggaaagagcatcc

SEQ ID NO: 5743 - RNA, 22 nt, synthetic construct
  source 1..22: mol_type = other RNA
aagtggggtggtcgaaggggaa

SEQ ID NO: 5744 - RNA, 22 nt, synthetic construct
  source 1..22: mol_type = other RNA
aagtggtccggactcaggagag

SEQ ID NO: 5745 - RNA, 22 nt, synthetic construct
  source 1..22: mol_type = other RNA
aatccacaggagaacggggtgt

SEQ ID NO: 5746 - RNA, 22 nt, synthetic construct
  source 1..22: mol_type = other RNA
aatgaaaggagtgagaggtgac

SEQ ID NO: 5747 - RNA, 22 nt, synthetic construct
  source 1..22: mol_type = other RNA
aatgcaggtcagagaaagcagg

SEQ ID NO: 5748 - RNA, 22 nt, synthetic construct
  source 1..22: mol_type = other RNA
aatgcggaagagagtaggtcga

SEQ ID NO: 5749 - RNA, 22 nt, synthetic construct
  source 1..22: mol_type = other RNA
aatggccagggccaggcagata

SEQ ID NO: 5750 - RNA, 22 nt, synthetic construct
  source 1..22: mol_type = other RNA
aatggtaaggaggcctggggca

SEQ ID NO: 5751 - RNA, 22 nt, synthetic construct
  source 1..22: mol_type = other RNA
aatggtaagggggactgggacg

SEQ ID NO: 5752 - RNA, 22 nt, synthetic construct
  source 1..22: mol_type = other RNA
aattcggaagtggggtggtcga

SEQ ID NO: 5753 - RNA, 22 nt, synthetic construct
  source 1..22: mol_type = other RNA
aattggagccgcttcaactggc

SEQ ID NO: 5754 - RNA, 22 nt, synthetic construct
  source 1..22: mol_type = other RNA
acaaagtccaggaccggctgga

SEQ ID NO: 5755 - RNA, 22 nt, synthetic construct
  source 1..22: mol_type = other RNA
acaaccccaaagtaccccgtct

SEQ ID NO: 5756 - RNA, 22 nt, synthetic construct
  source 1..22: mol_type = other RNA
acaagaaggggaggcgggacgc

SEQ ID NO: 5757 - RNA, 22 nt, synthetic construct
  source 1..22: mol_type = other RNA
acaagctgcagacagaaagcgg

SEQ ID NO: 5758 - RNA, 22 nt, synthetic construct
  source 1..22: mol_type = other RNA
acaatggccagggccaggcaga

SEQ ID NO: 5759 - RNA, 22 nt, synthetic construct
  source 1..22: mol_type = other RNA
acacagcagagagcaaggggaa

SEQ ID NO: 5760 - RNA, 22 nt, synthetic construct
  source 1..22: mol_type = other RNA
acaccccgtcccagtccccctt

SEQ ID NO: 5761 - RNA, 22 nt, synthetic construct
  source 1..22: mol_type = other RNA
acaccccgttctcctgtggatt

SEQ ID NO: 5762 - RNA, 22 nt, synthetic construct
  source 1..22: mol_type = other RNA
acacggggaggatccgctcaga

SEQ ID NO: 5763 - RNA, 22 nt, synthetic construct
  source 1..22: mol_type = other RNA
acagaaagcggcacaggcccag

SEQ ID NO: 5764 - RNA, 22 nt, synthetic construct
  source 1..22: mol_type = other RNA
acagactagagaggtaaggggg

SEQ ID NO: 5765 - RNA, 22 nt, synthetic construct
  source 1..22: mol_type = other RNA
acagagtggctaagcccagggc

SEQ ID NO: 5766 - RNA, 22 nt, synthetic construct
  source 1..22: mol_type = other RNA
acagcaagggcactcgggggcg

SEQ ID NO: 5767 - RNA, 22 nt, synthetic construct
  source 1..22: mol_type = other RNA
acagcagagagcaaggggaaga

SEQ ID NO: 5768 - RNA, 22 nt, synthetic construct
  source 1..22: mol_type = other RNA
acaggagaacggggtgtccagg

SEQ ID NO: 5769 - RNA, 22 nt, synthetic construct
  source 1..22: mol_type = other RNA
acaggcccaggggagagaatgc

SEQ ID NO: 5770 - RNA, 22 nt, synthetic construct
  source 1..22: mol_type = other RNA
acaggccccagaaggagaagga

SEQ ID NO: 5771 - RNA, 22 nt, synthetic construct
  source 1..22: mol_type = other RNA
acaggctgccaaagccagggcc

SEQ ID NO: 5772 - RNA, 22 nt, synthetic construct
  source 1..22: mol_type = other RNA
acagtgggccagaggcggcgca

SEQ ID NO: 5773 - RNA, 22 nt, synthetic construct
  source 1..22: mol_type = other RNA
acatcacgtggtgcagcgccga

SEQ ID NO: 5774 - RNA, 22 nt, synthetic construct
  source 1..22: mol_type = other RNA
acatccgtcggagaaggccatc

SEQ ID NO: 5775 - RNA, 22 nt, synthetic construct
  source 1..22: mol_type = other RNA
acatcggaagaggggaagtcga

SEQ ID NO: 5776 - RNA, 22 nt, synthetic construct
  source 1..22: mol_type = other RNA
accaccccacttccgaattgga

SEQ ID NO: 5777 - RNA, 22 nt, synthetic construct
  source 1..22: mol_type = other RNA
accacgtgatgtcctctgagcg

SEQ ID NO: 5778 - RNA, 22 nt, synthetic construct
  source 1..22: mol_type = other RNA
accactctgccccaggcctcct

SEQ ID NO: 5779 - RNA, 22 nt, synthetic construct
  source 1..22: mol_type = other RNA
accactttgagctctactggct

SEQ ID NO: 5780 - RNA, 22 nt, synthetic construct
  source 1..22: mol_type = other RNA
accagactgagctatgggagct

SEQ ID NO: 5781 - RNA, 22 nt, synthetic construct
  source 1..22: mol_type = other RNA
accatccctccctcgacttccc

SEQ ID NO: 5782 - RNA, 22 nt, synthetic construct
  source 1..22: mol_type = other RNA
accattccccttcgaccacccc

SEQ ID NO: 5783 - RNA, 22 nt, synthetic construct
  source 1..22: mol_type = other RNA
accattccccttcgacctactc

SEQ ID NO: 5784 - RNA, 22 nt, synthetic construct
  source 1..22: mol_type = other RNA
acccaaccccatgccgtcttca

SEQ ID NO: 5785 - RNA, 22 nt, synthetic construct
  source 1..22: mol_type = other RNA
acccagacacggggaggatccg

SEQ ID NO: 5786 - RNA, 22 nt, synthetic construct
  source 1..22: mol_type = other RNA
acccagcgagtgaagacggcat

SEQ ID NO: 5787 - RNA, 22 nt, synthetic construct
  source 1..22: mol_type = other RNA
acccaggccacaagctgcagac

SEQ ID NO: 5788 - RNA, 22 nt, synthetic construct
  source 1..22: mol_type = other RNA
acccatgcagtcctccttacca

SEQ ID NO: 5789 - RNA, 22 nt, synthetic construct
  source 1..22: mol_type = other RNA
accccaaagtaccccgtctccc

SEQ ID NO: 5790 - RNA, 22 nt, synthetic construct
  source 1..22: mol_type = other RNA
accccacttccgaattggagcc

SEQ ID NO: 5791 - RNA, 22 nt, synthetic construct
  source 1..22: mol_type = other RNA
accccatgccgtcttcactcgc

SEQ ID NO: 5792 - RNA, 22 nt, synthetic construct
  source 1..22: mol_type = other RNA
accccccttacctctctagtct

SEQ ID NO: 5793 - RNA, 22 nt, synthetic construct
  source 1..22: mol_type = other RNA
accccgtcccagtcccccttac

SEQ ID NO: 5794 - RNA, 22 nt, synthetic construct
  source 1..22: mol_type = other RNA
accccgtctccctggctttagc

SEQ ID NO: 5795 - RNA, 22 nt, synthetic construct
  source 1..22: mol_type = other RNA
accccgttctcctgtggattcg

SEQ ID NO: 5796 - RNA, 22 nt, synthetic construct
  source 1..22: mol_type = other RNA
acccgaatccacaggagaacgg

SEQ ID NO: 5797 - RNA, 22 nt, synthetic construct
  source 1..22: mol_type = other RNA
accctatgctgacaccccgtcc

SEQ ID NO: 5798 - RNA, 22 nt, synthetic construct
  source 1..22: mol_type = other RNA
accggctggaggggctcaacat

SEQ ID NO: 5799 - RNA, 22 nt, synthetic construct
  source 1..22: mol_type = other RNA
accgtttttctggacaacccca

SEQ ID NO: 5800 - RNA, 22 nt, synthetic construct
  source 1..22: mol_type = other RNA
acctactctcttccgcattgga

SEQ ID NO: 5801 - RNA, 22 nt, synthetic construct
  source 1..22: mol_type = other RNA
acctctacggctggcccagatc

SEQ ID NO: 5802 - RNA, 22 nt, synthetic construct
  source 1..22: mol_type = other RNA
acctctcactcctttcatttgg

SEQ ID NO: 5803 - RNA, 22 nt, synthetic construct
  source 1..22: mol_type = other RNA
acctctccatcctcttgctttc

SEQ ID NO: 5804 - RNA, 22 nt, synthetic construct
  source 1..22: mol_type = other RNA
acctgaaggaggcggcagggaa

SEQ ID NO: 5805 - RNA, 22 nt, synthetic construct
  source 1..22: mol_type = other RNA
acctgagccagctcccatagct

SEQ ID NO: 5806 - RNA, 22 nt, synthetic construct
  source 1..22: mol_type = other RNA
acctgcattctctcccctgggc

SEQ ID NO: 5807 - RNA, 22 nt, synthetic construct
  source 1..22: mol_type = other RNA
acctgcctgggaaggggaaaca

SEQ ID NO: 5808 - RNA, 22 nt, synthetic construct
  source 1..22: mol_type = other RNA
acgagagatggcacaggcccca

SEQ ID NO: 5809 - RNA, 22 nt, synthetic construct
  source 1..22: mol_type = other RNA
acgcaagggagacatccgtcgg

SEQ ID NO: 5810 - RNA, 22 nt, synthetic construct
  source 1..22: mol_type = other RNA
acgctgccgtctctctcctgag

SEQ ID NO: 5811 - RNA, 22 nt, synthetic construct
  source 1..22: mol_type = other RNA
acggaacctgaaggaggcggca

SEQ ID NO: 5812 - RNA, 22 nt, synthetic construct
  source 1..22: mol_type = other RNA
acggatgtctcccttgcgtccc

SEQ ID NO: 5813 - RNA, 22 nt, synthetic construct
  source 1..22: mol_type = other RNA
acggcagcgttagagggcagag

SEQ ID NO: 5814 - RNA, 22 nt, synthetic construct
  source 1..22: mol_type = other RNA
acggcatggggttgggtgaggg

SEQ ID NO: 5815 - RNA, 22 nt, synthetic construct
  source 1..22: mol_type = other RNA
acggctggcccagatccttccc

SEQ ID NO: 5816 - RNA, 22 nt, synthetic construct
  source 1..22: mol_type = other RNA
acggggaggatccgctcagagg

SEQ ID NO: 5817 - RNA, 22 nt, synthetic construct
  source 1..22: mol_type = other RNA
acggggtactttggggttgtcc

SEQ ID NO: 5818 - RNA, 22 nt, synthetic construct
  source 1..22: mol_type = other RNA
acggggtgtcagcatagggtgg

SEQ ID NO: 5819 - RNA, 22 nt, synthetic construct
  source 1..22: mol_type = other RNA
acggggtgtccaggcaaagaaa

SEQ ID NO: 5820 - RNA, 22 nt, synthetic construct
  source 1..22: mol_type = other RNA
acggtgatgatgcaggcctaca

SEQ ID NO: 5821 - RNA, 22 nt, synthetic construct
  source 1..22: mol_type = other RNA
acgtgatgtcctctgagcggat

SEQ ID NO: 5822 - RNA, 22 nt, synthetic construct
  source 1..22: mol_type = other RNA
acgtggtgcagcgccgagaagg

SEQ ID NO: 5823 - RNA, 22 nt, synthetic construct
  source 1..22: mol_type = other RNA
actagagaggtaaggggggtag

SEQ ID NO: 5824 - RNA, 22 nt, synthetic construct
  source 1..22: mol_type = other RNA
actcaggagagagacggcagcg

SEQ ID NO: 5825 - RNA, 22 nt, synthetic construct
  source 1..22: mol_type = other RNA
actccaatgcggaagagagtag

SEQ ID NO: 5826 - RNA, 22 nt, synthetic construct
  source 1..22: mol_type = other RNA
actccctcttccccttgctctc

SEQ ID NO: 5827 - RNA, 22 nt, synthetic construct
  source 1..22: mol_type = other RNA
actcctttcatttgggcagctc

SEQ ID NO: 5828 - RNA, 22 nt, synthetic construct
  source 1..22: mol_type = other RNA
actcgctgggttcccttttcct

SEQ ID NO: 5829 - RNA, 22 nt, synthetic construct
  source 1..22: mol_type = other RNA
actcgggggcgagaggagggca

SEQ ID NO: 5830 - RNA, 22 nt, synthetic construct
  source 1..22: mol_type = other RNA
actctcttccgcattggagtcg

SEQ ID NO: 5831 - RNA, 22 nt, synthetic construct
  source 1..22: mol_type = other RNA
actctgccccaggcctccttac

SEQ ID NO: 5832 - RNA, 22 nt, synthetic construct
  source 1..22: mol_type = other RNA
actctgccctctaacgctgccg

SEQ ID NO: 5833 - RNA, 22 nt, synthetic construct
  source 1..22: mol_type = other RNA
actctgtgctgaccactctgcc

SEQ ID NO: 5834 - RNA, 22 nt, synthetic construct
  source 1..22: mol_type = other RNA
actgagctatgggagctggctc

SEQ ID NO: 5835 - RNA, 22 nt, synthetic construct
  source 1..22: mol_type = other RNA
actgcatgggtcagcacaggct

SEQ ID NO: 5836 - RNA, 22 nt, synthetic construct
  source 1..22: mol_type = other RNA
actggccctggctttggcagcc

SEQ ID NO: 5837 - RNA, 22 nt, synthetic construct
  source 1..22: mol_type = other RNA
actggccctgggcttagccact

SEQ ID NO: 5838 - RNA, 22 nt, synthetic construct
  source 1..22: mol_type = other RNA
actggcttctgcgccgcctctg

SEQ ID NO: 5839 - RNA, 22 nt, synthetic construct
  source 1..22: mol_type = other RNA
actgggacggggtgtcagcata

SEQ ID NO: 5840 - RNA, 22 nt, synthetic construct
  source 1..22: mol_type = other RNA
actgtttccccttcccaggcag

SEQ ID NO: 5841 - RNA, 22 nt, synthetic construct
  source 1..22: mol_type = other RNA
acttcccctcttccgatgttga

SEQ ID NO: 5842 - RNA, 22 nt, synthetic construct
  source 1..22: mol_type = other RNA
acttccgaattggagccgcttc

SEQ ID NO: 5843 - RNA, 22 nt, synthetic construct
  source 1..22: mol_type = other RNA
acttccttctcggcgctgcacc

SEQ ID NO: 5844 - RNA, 22 nt, synthetic construct
  source 1..22: mol_type = other RNA
actttgagctctactggcttct

SEQ ID NO: 5845 - RNA, 22 nt, synthetic construct
  source 1..22: mol_type = other RNA
actttgcgctgccctcctctcg

SEQ ID NO: 5846 - RNA, 22 nt, synthetic construct
  source 1..22: mol_type = other RNA
actttggggttgtccagaaaaa

SEQ ID NO: 5847 - RNA, 22 nt, synthetic construct
  source 1..22: mol_type = other RNA
actttgtctccttccctgccct

SEQ ID NO: 5848 - RNA, 22 nt, synthetic construct
  source 1..22: mol_type = other RNA
agaaaaacggtgatgatgcagg

SEQ ID NO: 5849 - RNA, 22 nt, synthetic construct
  source 1..22: mol_type = other RNA
agaaacgagagatggcacaggc

SEQ ID NO: 5850 - RNA, 22 nt, synthetic construct
  source 1..22: mol_type = other RNA
agaaagcaagaggatggagagg

SEQ ID NO: 5851 - RNA, 22 nt, synthetic construct
  source 1..22: mol_type = other RNA
agaaagcaggacctgcctggga

SEQ ID NO: 5852 - RNA, 22 nt, synthetic construct
  source 1..22: mol_type = other RNA
agaaagcggcacaggcccaggg

SEQ ID NO: 5853 - RNA, 22 nt, synthetic construct
  source 1..22: mol_type = other RNA
agaacggggtgtccaggcaaag

SEQ ID NO: 5854 - RNA, 22 nt, synthetic construct
  source 1..22: mol_type = other RNA
agaagccagtagagctcaaagt

SEQ ID NO: 5855 - RNA, 22 nt, synthetic construct
  source 1..22: mol_type = other RNA
agaaggaaaagggaacccagcg

SEQ ID NO: 5856 - RNA, 22 nt, synthetic construct
  source 1..22: mol_type = other RNA
agaaggaagtgctccggaaaga

SEQ ID NO: 5857 - RNA, 22 nt, synthetic construct
  source 1..22: mol_type = other RNA
agaaggagaaggaaaagggaac

SEQ ID NO: 5858 - RNA, 22 nt, synthetic construct
  source 1..22: mol_type = other RNA
agaaggccatcctaagaaacga

SEQ ID NO: 5859 - RNA, 22 nt, synthetic construct
  source 1..22: mol_type = other RNA
agaaggggaggcgggacgcaag

SEQ ID NO: 5860 - RNA, 22 nt, synthetic construct
  source 1..22: mol_type = other RNA
agaatgcaggtcagagaaagca

SEQ ID NO: 5861 - RNA, 22 nt, synthetic construct
  source 1..22: mol_type = other RNA
agacaaagtccaggaccggctg

SEQ ID NO: 5862 - RNA, 22 nt, synthetic construct
  source 1..22: mol_type = other RNA
agacacggggaggatccgctca

SEQ ID NO: 5863 - RNA, 22 nt, synthetic construct
  source 1..22: mol_type = other RNA
agacagaaagcggcacaggccc

SEQ ID NO: 5864 - RNA, 22 nt, synthetic construct
  source 1..22: mol_type = other RNA
agacatccgtcggagaaggcca

SEQ ID NO: 5865 - RNA, 22 nt, synthetic construct
  source 1..22: mol_type = other RNA
agaccagactgagctatgggag

SEQ ID NO: 5866 - RNA, 22 nt, synthetic construct
  source 1..22: mol_type = other RNA
agacggaacctgaaggaggcgg

SEQ ID NO: 5867 - RNA, 22 nt, synthetic construct
  source 1..22: mol_type = other RNA
agacggcagcgttagagggcag

SEQ ID NO: 5868 - RNA, 22 nt, synthetic construct
  source 1..22: mol_type = other RNA
agacggcatggggttgggtgag

SEQ ID NO: 5869 - RNA, 22 nt, synthetic construct
  source 1..22: mol_type = other RNA
agacggggtactttggggttgt

SEQ ID NO: 5870 - RNA, 22 nt, synthetic construct
  source 1..22: mol_type = other RNA
agactagagaggtaaggggggt

SEQ ID NO: 5871 - RNA, 22 nt, synthetic construct
  source 1..22: mol_type = other RNA
agactgagctatgggagctggc

SEQ ID NO: 5872 - RNA, 22 nt, synthetic construct
  source 1..22: mol_type = other RNA
agagaaagcaggacctgcctgg

SEQ ID NO: 5873 - RNA, 22 nt, synthetic construct
  source 1..22: mol_type = other RNA
agagaatgcaggtcagagaaag

SEQ ID NO: 5874 - RNA, 22 nt, synthetic construct
  source 1..22: mol_type = other RNA
agagacggcagcgttagagggc

SEQ ID NO: 5875 - RNA, 22 nt, synthetic construct
  source 1..22: mol_type = other RNA
agagagacggcagcgttagagg

SEQ ID NO: 5876 - RNA, 22 nt, synthetic construct
  source 1..22: mol_type = other RNA
agagagcaaggggaagagggag

SEQ ID NO: 5877 - RNA, 22 nt, synthetic construct
  source 1..22: mol_type = other RNA
agagaggtaaggggggtagggg

SEQ ID NO: 5878 - RNA, 22 nt, synthetic construct
  source 1..22: mol_type = other RNA
agagagtaggtcgaaggggaat

SEQ ID NO: 5879 - RNA, 22 nt, synthetic construct
  source 1..22: mol_type = other RNA
agagatgcccggagaggaccca

SEQ ID NO: 5880 - RNA, 22 nt, synthetic construct
  source 1..22: mol_type = other RNA
agagatggcacaggccccagaa

SEQ ID NO: 5881 - RNA, 22 nt, synthetic construct
  source 1..22: mol_type = other RNA
agagcaaggggaagagggagtg

SEQ ID NO: 5882 - RNA, 22 nt, synthetic construct
  source 1..22: mol_type = other RNA
agagcatccttgggcagcaaca

SEQ ID NO: 5883 - RNA, 22 nt, synthetic construct
  source 1..22: mol_type = other RNA
agagctcaaagtggtccggact

SEQ ID NO: 5884 - RNA, 22 nt, synthetic construct
  source 1..22: mol_type = other RNA
agaggacatcacgtggtgcagc

SEQ ID NO: 5885 - RNA, 22 nt, synthetic construct
  source 1..22: mol_type = other RNA
agaggacccagacacggggagg

SEQ ID NO: 5886 - RNA, 22 nt, synthetic construct
  source 1..22: mol_type = other RNA
agaggagggcagcgcaaagtga

SEQ ID NO: 5887 - RNA, 22 nt, synthetic construct
  source 1..22: mol_type = other RNA
agaggatggagaggtggctaaa

SEQ ID NO: 5888 - RNA, 22 nt, synthetic construct
  source 1..22: mol_type = other RNA
agaggcggcgcagaagccagta

SEQ ID NO: 5889 - RNA, 22 nt, synthetic construct
  source 1..22: mol_type = other RNA
agagggagtggaggaagacgga

SEQ ID NO: 5890 - RNA, 22 nt, synthetic construct
  source 1..22: mol_type = other RNA
agagggcagagttccggcggca

SEQ ID NO: 5891 - RNA, 22 nt, synthetic construct
  source 1..22: mol_type = other RNA
agagggcagggcagggaaggag

SEQ ID NO: 5892 - RNA, 22 nt, synthetic construct
  source 1..22: mol_type = other RNA
agaggggaagtcgagggaggga

SEQ ID NO: 5893 - RNA, 22 nt, synthetic construct
  source 1..22: mol_type = other RNA
agaggtaaggggggtaggggag

SEQ ID NO: 5894 - RNA, 22 nt, synthetic construct
  source 1..22: mol_type = other RNA
agaggtgacccaggccacaagc

SEQ ID NO: 5895 - RNA, 22 nt, synthetic construct
  source 1..22: mol_type = other RNA
agaggtgacccgaatccacagg

SEQ ID NO: 5896 - RNA, 22 nt, synthetic construct
  source 1..22: mol_type = other RNA
agaggtggctaaagccagggag

SEQ ID NO: 5897 - RNA, 22 nt, synthetic construct
  source 1..22: mol_type = other RNA
agagtaggtcgaaggggaatgg

SEQ ID NO: 5898 - RNA, 22 nt, synthetic construct
  source 1..22: mol_type = other RNA
agagtggctaagcccagggcca

SEQ ID NO: 5899 - RNA, 22 nt, synthetic construct
  source 1..22: mol_type = other RNA
agagtggtcagcacagagtggc

SEQ ID NO: 5900 - RNA, 22 nt, synthetic construct
  source 1..22: mol_type = other RNA
agagttccggcggcacagcaag

SEQ ID NO: 5901 - RNA, 22 nt, synthetic construct
  source 1..22: mol_type = other RNA
agatagaccagactgagctatg

SEQ ID NO: 5902 - RNA, 22 nt, synthetic construct
  source 1..22: mol_type = other RNA
agatccttccctgccgcctcct

SEQ ID NO: 5903 - RNA, 22 nt, synthetic construct
  source 1..22: mol_type = other RNA
agatgcccggagaggacccaga

SEQ ID NO: 5904 - RNA, 22 nt, synthetic construct
  source 1..22: mol_type = other RNA
agatggcacaggccccagaagg

SEQ ID NO: 5905 - RNA, 22 nt, synthetic construct
  source 1..22: mol_type = other RNA
agcaacacagcagagagcaagg

SEQ ID NO: 5906 - RNA, 22 nt, synthetic construct
  source 1..22: mol_type = other RNA
agcaagaggatggagaggtggc

SEQ ID NO: 5907 - RNA, 22 nt, synthetic construct
  source 1..22: mol_type = other RNA
agcaagggcactcgggggcgag

SEQ ID NO: 5908 - RNA, 22 nt, synthetic construct
  source 1..22: mol_type = other RNA
agcaaggggaagagggagtgga

SEQ ID NO: 5909 - RNA, 22 nt, synthetic construct
  source 1..22: mol_type = other RNA
agcacagactagagaggtaagg

SEQ ID NO: 5910 - RNA, 22 nt, synthetic construct
  source 1..22: mol_type = other RNA
agcacagagtggctaagcccag

SEQ ID NO: 5911 - RNA, 22 nt, synthetic construct
  source 1..22: mol_type = other RNA
agcacaggctgccaaagccagg

SEQ ID NO: 5912 - RNA, 22 nt, synthetic construct
  source 1..22: mol_type = other RNA
agcacttccttctcggcgctgc

SEQ ID NO: 5913 - RNA, 22 nt, synthetic construct
  source 1..22: mol_type = other RNA
agcagagagcaaggggaagagg

SEQ ID NO: 5914 - RNA, 22 nt, synthetic construct
  source 1..22: mol_type = other RNA
agcaggacctgcctgggaaggg

SEQ ID NO: 5915 - RNA, 22 nt, synthetic construct
  source 1..22: mol_type = other RNA
agcatagggtggcaaagcccag

SEQ ID NO: 5916 - RNA, 22 nt, synthetic construct
  source 1..22: mol_type = other RNA
agcatccttgggcagcaacaca

SEQ ID NO: 5917 - RNA, 22 nt, synthetic construct
  source 1..22: mol_type = other RNA
agccacctctccatcctcttgc

SEQ ID NO: 5918 - RNA, 22 nt, synthetic construct
  source 1..22: mol_type = other RNA
agccactctgtgctgaccactc

SEQ ID NO: 5919 - RNA, 22 nt, synthetic construct
  source 1..22: mol_type = other RNA
agccagctcccatagctcagtc

SEQ ID NO: 5920 - RNA, 22 nt, synthetic construct
  source 1..22: mol_type = other RNA
agccagggagacggggtacttt

SEQ ID NO: 5921 - RNA, 22 nt, synthetic construct
  source 1..22: mol_type = other RNA
agccagggccagttaaagcgac

SEQ ID NO: 5922 - RNA, 22 nt, synthetic construct
  source 1..22: mol_type = other RNA
agccagtagagctcaaagtggt

SEQ ID NO: 5923 - RNA, 22 nt, synthetic construct
  source 1..22: mol_type = other RNA
agcccagggccagttgaagcgg

SEQ ID NO: 5924 - RNA, 22 nt, synthetic construct
  source 1..22: mol_type = other RNA
agcccctccagccggtcctgga

SEQ ID NO: 5925 - RNA, 22 nt, synthetic construct
  source 1..22: mol_type = other RNA
agccgcttcaactggccctggg

SEQ ID NO: 5926 - RNA, 22 nt, synthetic construct
  source 1..22: mol_type = other RNA
agccggtcctggactttgtctc

SEQ ID NO: 5927 - RNA, 22 nt, synthetic construct
  source 1..22: mol_type = other RNA
agccgtagaggtgacccaggcc

SEQ ID NO: 5928 - RNA, 22 nt, synthetic construct
  source 1..22: mol_type = other RNA
agcctgtgctgacccatgcagt

SEQ ID NO: 5929 - RNA, 22 nt, synthetic construct
  source 1..22: mol_type = other RNA
agcgactccaatgcggaagaga

SEQ ID NO: 5930 - RNA, 22 nt, synthetic construct
  source 1..22: mol_type = other RNA
agcgagtgaagacggcatgggg

SEQ ID NO: 5931 - RNA, 22 nt, synthetic construct
  source 1..22: mol_type = other RNA
agcgcaaagtgacaatggccag

SEQ ID NO: 5932 - RNA, 22 nt, synthetic construct
  source 1..22: mol_type = other RNA
agcgccgagaaggaagtgctcc

SEQ ID NO: 5933 - RNA, 22 nt, synthetic construct
  source 1..22: mol_type = other RNA
agcggatcctccccgtgtctgg

SEQ ID NO: 5934 - RNA, 22 nt, synthetic construct
  source 1..22: mol_type = other RNA
agcggcacaggcccaggggaga

SEQ ID NO: 5935 - RNA, 22 nt, synthetic construct
  source 1..22: mol_type = other RNA
agcggctccaattcggaagtgg

SEQ ID NO: 5936 - RNA, 22 nt, synthetic construct
  source 1..22: mol_type = other RNA
agcgttagagggcagagttccg

SEQ ID NO: 5937 - RNA, 22 nt, synthetic construct
  source 1..22: mol_type = other RNA
agctagcacagactagagaggt

SEQ ID NO: 5938 - RNA, 22 nt, synthetic construct
  source 1..22: mol_type = other RNA
agctatgggagctggctcaggt

SEQ ID NO: 5939 - RNA, 22 nt, synthetic construct
  source 1..22: mol_type = other RNA
agctcaaagtggtccggactca

SEQ ID NO: 5940 - RNA, 22 nt, synthetic construct
  source 1..22: mol_type = other RNA
agctcagtctggtctatctgcc

SEQ ID NO: 5941 - RNA, 22 nt, synthetic construct
  source 1..22: mol_type = other RNA
agctcccatagctcagtctggt

SEQ ID NO: 5942 - RNA, 22 nt, synthetic construct
  source 1..22: mol_type = other RNA
agctcccctaccccccttacct

SEQ ID NO: 5943 - RNA, 22 nt, synthetic construct
  source 1..22: mol_type = other RNA
agctctactggcttctgcgccg

SEQ ID NO: 5944 - RNA, 22 nt, synthetic construct
  source 1..22: mol_type = other RNA
agctgcagacagaaagcggcac

SEQ ID NO: 5945 - RNA, 22 nt, synthetic construct
  source 1..22: mol_type = other RNA
agctgcccaaatgaaaggagtg

SEQ ID NO: 5946 - RNA, 22 nt, synthetic construct
  source 1..22: mol_type = other RNA
agctggctcaggttcaggagag

SEQ ID NO: 5947 - RNA, 22 nt, synthetic construct
  source 1..22: mol_type = other RNA
agcttgtggcctgggtcacctc

SEQ ID NO: 5948 - RNA, 22 nt, synthetic construct
  source 1..22: mol_type = other RNA
aggaaaagggaacccagcgagt

SEQ ID NO: 5949 - RNA, 22 nt, synthetic construct
  source 1..22: mol_type = other RNA
aggaagacggaacctgaaggag

SEQ ID NO: 5950 - RNA, 22 nt, synthetic construct
  source 1..22: mol_type = other RNA
aggaagtgctccggaaagagca

SEQ ID NO: 5951 - RNA, 22 nt, synthetic construct
  source 1..22: mol_type = other RNA
aggacatcacgtggtgcagcgc

SEQ ID NO: 5952 - RNA, 22 nt, synthetic construct
  source 1..22: mol_type = other RNA
aggacccagacacggggaggat

SEQ ID NO: 5953 - RNA, 22 nt, synthetic construct
  source 1..22: mol_type = other RNA
aggaccggctggaggggctcaa

SEQ ID NO: 5954 - RNA, 22 nt, synthetic construct
  source 1..22: mol_type = other RNA
aggacctgcctgggaaggggaa

SEQ ID NO: 5955 - RNA, 22 nt, synthetic construct
  source 1..22: mol_type = other RNA
aggactgcatgggtcagcacag

SEQ ID NO: 5956 - RNA, 22 nt, synthetic construct
  source 1..22: mol_type = other RNA
aggagaacggggtgtccaggca

SEQ ID NO: 5957 - RNA, 22 nt, synthetic construct
  source 1..22: mol_type = other RNA
aggagaaggaaaagggaaccca

SEQ ID NO: 5958 - RNA, 22 nt, synthetic construct
  source 1..22: mol_type = other RNA
aggagacaaagtccaggaccgg

SEQ ID NO: 5959 - RNA, 22 nt, synthetic construct
  source 1..22: mol_type = other RNA
aggagagagacggcagcgttag

SEQ ID NO: 5960 - RNA, 22 nt, synthetic construct
  source 1..22: mol_type = other RNA
aggagagatgcccggagaggac

SEQ ID NO: 5961 - RNA, 22 nt, synthetic construct
  source 1..22: mol_type = other RNA
aggagagggcagggcagggaag

SEQ ID NO: 5962 - RNA, 22 nt, synthetic construct
  source 1..22: mol_type = other RNA
aggaggactgcatgggtcagca

SEQ ID NO: 5963 - RNA, 22 nt, synthetic construct
  source 1..22: mol_type = other RNA
aggaggcctggggcagagtggt

SEQ ID NO: 5964 - RNA, 22 nt, synthetic construct
  source 1..22: mol_type = other RNA
aggaggcggcagggaaggatct

SEQ ID NO: 5965 - RNA, 22 nt, synthetic construct
  source 1..22: mol_type = other RNA
aggagggcagcgcaaagtgaca

SEQ ID NO: 5966 - RNA, 22 nt, synthetic construct
  source 1..22: mol_type = other RNA
aggagtgagaggtgacccgaat

SEQ ID NO: 5967 - RNA, 22 nt, synthetic construct
  source 1..22: mol_type = other RNA
aggatccgctcagaggacatca

SEQ ID NO: 5968 - RNA, 22 nt, synthetic construct
  source 1..22: mol_type = other RNA
aggatctgggccagccgtagag

SEQ ID NO: 5969 - RNA, 22 nt, synthetic construct
  source 1..22: mol_type = other RNA
aggatgctctttccggagcact

SEQ ID NO: 5970 - RNA, 22 nt, synthetic construct
  source 1..22: mol_type = other RNA
aggatggagaggtggctaaagc

SEQ ID NO: 5971 - RNA, 22 nt, synthetic construct
  source 1..22: mol_type = other RNA
aggatggccttctccgacggat

SEQ ID NO: 5972 - RNA, 22 nt, synthetic construct
  source 1..22: mol_type = other RNA
aggcaaagaaagcaagaggatg

SEQ ID NO: 5973 - RNA, 22 nt, synthetic construct
  source 1..22: mol_type = other RNA
aggcagatagaccagactgagc

SEQ ID NO: 5974 - RNA, 22 nt, synthetic construct
  source 1..22: mol_type = other RNA
aggcaggtcctgctttctctga

SEQ ID NO: 5975 - RNA, 22 nt, synthetic construct
  source 1..22: mol_type = other RNA
aggccacaagctgcagacagaa

SEQ ID NO: 5976 - RNA, 22 nt, synthetic construct
  source 1..22: mol_type = other RNA
aggccatcctaagaaacgagag

SEQ ID NO: 5977 - RNA, 22 nt, synthetic construct
  source 1..22: mol_type = other RNA
aggcccaggggagagaatgcag

SEQ ID NO: 5978 - RNA, 22 nt, synthetic construct
  source 1..22: mol_type = other RNA
aggccccagaaggagaaggaaa

SEQ ID NO: 5979 - RNA, 22 nt, synthetic construct
  source 1..22: mol_type = other RNA
aggcctacaagaaggggaggcg

SEQ ID NO: 5980 - RNA, 22 nt, synthetic construct
  source 1..22: mol_type = other RNA
aggcctccttaccattcccctt

SEQ ID NO: 5981 - RNA, 22 nt, synthetic construct
  source 1..22: mol_type = other RNA
aggcctgcatcatcaccgtttt

SEQ ID NO: 5982 - RNA, 22 nt, synthetic construct
  source 1..22: mol_type = other RNA
aggcctggggcagagtggtcag

SEQ ID NO: 5983 - RNA, 22 nt, synthetic construct
  source 1..22: mol_type = other RNA
aggcggcagggaaggatctggg

SEQ ID NO: 5984 - RNA, 22 nt, synthetic construct
  source 1..22: mol_type = other RNA
aggcggcgcagaagccagtaga

SEQ ID NO: 5985 - RNA, 22 nt, synthetic construct
  source 1..22: mol_type = other RNA
aggcgggacgcaagggagacat

SEQ ID NO: 5986 - RNA, 22 nt, synthetic construct
  source 1..22: mol_type = other RNA
aggctgccaaagccagggccag

SEQ ID NO: 5987 - RNA, 22 nt, synthetic construct
  source 1..22: mol_type = other RNA
agggaacccagcgagtgaagac

SEQ ID NO: 5988 - RNA, 22 nt, synthetic construct
  source 1..22: mol_type = other RNA
agggaaggagacaaagtccagg

SEQ ID NO: 5989 - RNA, 22 nt, synthetic construct
  source 1..22: mol_type = other RNA
agggaaggatctgggccagccg

SEQ ID NO: 5990 - RNA, 22 nt, synthetic construct
  source 1..22: mol_type = other RNA
agggagacatccgtcggagaag

SEQ ID NO: 5991 - RNA, 22 nt, synthetic construct
  source 1..22: mol_type = other RNA
agggagacggggtactttgggg

SEQ ID NO: 5992 - RNA, 22 nt, synthetic construct
  source 1..22: mol_type = other RNA
agggaggagagatgcccggaga

SEQ ID NO: 5993 - RNA, 22 nt, synthetic construct
  source 1..22: mol_type = other RNA
agggagggatggtaaggaggac

SEQ ID NO: 5994 - RNA, 22 nt, synthetic construct
  source 1..22: mol_type = other RNA
agggagtggaggaagacggaac

SEQ ID NO: 5995 - RNA, 22 nt, synthetic construct
  source 1..22: mol_type = other RNA
agggatggtaaggaggactgca

SEQ ID NO: 5996 - RNA, 22 nt, synthetic construct
  source 1..22: mol_type = other RNA
agggcactcgggggcgagagga

SEQ ID NO: 5997 - RNA, 22 nt, synthetic construct
  source 1..22: mol_type = other RNA
agggcagagttccggcggcaca

SEQ ID NO: 5998 - RNA, 22 nt, synthetic construct
  source 1..22: mol_type = other RNA
agggcagcgcaaagtgacaatg

SEQ ID NO: 5999 - RNA, 22 nt, synthetic construct
  source 1..22: mol_type = other RNA
agggcagggaaggagacaaagt

SEQ ID NO: 6000 - RNA, 22 nt, synthetic construct
  source 1..22: mol_type = other RNA
agggcagggcagggaaggagac

SEQ ID NO: 6001 - RNA, 22 nt, synthetic construct
  source 1..22: mol_type = other RNA
agggccaggcagatagaccaga

SEQ ID NO: 6002 - RNA, 22 nt, synthetic construct
  source 1..22: mol_type = other RNA
agggccagttaaagcgactcca

SEQ ID NO: 6003 - RNA, 22 nt, synthetic construct
  source 1..22: mol_type = other RNA
agggccagttgaagcggctcca

SEQ ID NO: 6004 - RNA, 22 nt, synthetic construct
  source 1..22: mol_type = other RNA
aggggaaacagtgggccagagg

SEQ ID NO: 6005 - RNA, 22 nt, synthetic construct
  source 1..22: mol_type = other RNA
aggggaagagggagtggaggaa

SEQ ID NO: 6006 - RNA, 22 nt, synthetic construct
  source 1..22: mol_type = other RNA
aggggaagtcgagggagggatg

SEQ ID NO: 6007 - RNA, 22 nt, synthetic construct
  source 1..22: mol_type = other RNA
aggggaatggtaaggaggcctg

SEQ ID NO: 6008 - RNA, 22 nt, synthetic construct
  source 1..22: mol_type = other RNA
aggggaatggtaagggggactg

SEQ ID NO: 6009 - RNA, 22 nt, synthetic construct
  source 1..22: mol_type = other RNA
aggggagagaatgcaggtcaga

SEQ ID NO: 6010 - RNA, 22 nt, synthetic construct
  source 1..22: mol_type = other RNA
aggggagctgcccaaatgaaag

SEQ ID NO: 6011 - RNA, 22 nt, synthetic construct
  source 1..22: mol_type = other RNA
aggggaggcgggacgcaaggga

SEQ ID NO: 6012 - RNA, 22 nt, synthetic construct
  source 1..22: mol_type = other RNA
aggggctcaacatcggaagagg

SEQ ID NO: 6013 - RNA, 22 nt, synthetic construct
  source 1..22: mol_type = other RNA
agggggactgggacggggtgtc

SEQ ID NO: 6014 - RNA, 22 nt, synthetic construct
  source 1..22: mol_type = other RNA
aggggggtaggggagctgccca

SEQ ID NO: 6015 - RNA, 22 nt, synthetic construct
  source 1..22: mol_type = other RNA
agggtggcaaagcccagggcca

SEQ ID NO: 6016 - RNA, 22 nt, synthetic construct
  source 1..22: mol_type = other RNA
aggtaaggggggtaggggagct

SEQ ID NO: 6017 - RNA, 22 nt, synthetic construct
  source 1..22: mol_type = other RNA
aggtcagagaaagcaggacctg

SEQ ID NO: 6018 - RNA, 22 nt, synthetic construct
  source 1..22: mol_type = other RNA
aggtcctgctttctctgacctg

SEQ ID NO: 6019 - RNA, 22 nt, synthetic construct
  source 1..22: mol_type = other RNA
aggtcgaaggggaatggtaagg

SEQ ID NO: 6020 - RNA, 22 nt, synthetic construct
  source 1..22: mol_type = other RNA
aggtgacccaggccacaagctg

SEQ ID NO: 6021 - RNA, 22 nt, synthetic construct
  source 1..22: mol_type = other RNA
aggtgacccgaatccacaggag

SEQ ID NO: 6022 - RNA, 22 nt, synthetic construct
  source 1..22: mol_type = other RNA
aggtggctaaagccagggagac

SEQ ID NO: 6023 - RNA, 22 nt, synthetic construct
  source 1..22: mol_type = other RNA
aggttcaggagagggcagggca

SEQ ID NO: 6024 - RNA, 22 nt, synthetic construct
  source 1..22: mol_type = other RNA
aggttccgtcttcctccactcc

SEQ ID NO: 6025 - RNA, 22 nt, synthetic construct
  source 1..22: mol_type = other RNA
agtaccccgtctccctggcttt

SEQ ID NO: 6026 - RNA, 22 nt, synthetic construct
  source 1..22: mol_type = other RNA
agtagagctcaaagtggtccgg

SEQ ID NO: 6027 - RNA, 22 nt, synthetic construct
  source 1..22: mol_type = other RNA
agtaggtcgaaggggaatggta

SEQ ID NO: 6028 - RNA, 22 nt, synthetic construct
  source 1..22: mol_type = other RNA
agtccaggaccggctggagggg

SEQ ID NO: 6029 - RNA, 22 nt, synthetic construct
  source 1..22: mol_type = other RNA
agtcccccttaccattcccctt

SEQ ID NO: 6030 - RNA, 22 nt, synthetic construct
  source 1..22: mol_type = other RNA
agtccggaccactttgagctct

SEQ ID NO: 6031 - RNA, 22 nt, synthetic construct
  source 1..22: mol_type = other RNA
agtcctccttaccatccctccc

SEQ ID NO: 6032 - RNA, 22 nt, synthetic construct
  source 1..22: mol_type = other RNA
agtcgagggagggatggtaagg

SEQ ID NO: 6033 - RNA, 22 nt, synthetic construct
  source 1..22: mol_type = other RNA
agtcgctttaactggccctggc

SEQ ID NO: 6034 - RNA, 22 nt, synthetic construct
  source 1..22: mol_type = other RNA
agtctggtctatctgcctggcc

SEQ ID NO: 6035 - RNA, 22 nt, synthetic construct
  source 1..22: mol_type = other RNA
agtgaagacggcatggggttgg

SEQ ID NO: 6036 - RNA, 22 nt, synthetic construct
  source 1..22: mol_type = other RNA
agtgacaatggccagggccagg

SEQ ID NO: 6037 - RNA, 22 nt, synthetic construct
  source 1..22: mol_type = other RNA
agtgagaggtgacccgaatcca

SEQ ID NO: 6038 - RNA, 22 nt, synthetic construct
  source 1..22: mol_type = other RNA
agtgcccttgctgtgccgccgg

SEQ ID NO: 6039 - RNA, 22 nt, synthetic construct
  source 1..22: mol_type = other RNA
agtgctccggaaagagcatcct

SEQ ID NO: 6040 - RNA, 22 nt, synthetic construct
  source 1..22: mol_type = other RNA
agtggaggaagacggaacctga

SEQ ID NO: 6041 - RNA, 22 nt, synthetic construct
  source 1..22: mol_type = other RNA
agtggctaagcccagggccagt

SEQ ID NO: 6042 - RNA, 22 nt, synthetic construct
  source 1..22: mol_type = other RNA
agtgggccagaggcggcgcaga

SEQ ID NO: 6043 - RNA, 22 nt, synthetic construct
  source 1..22: mol_type = other RNA
agtggggtggtcgaaggggaat

SEQ ID NO: 6044 - RNA, 22 nt, synthetic construct
  source 1..22: mol_type = other RNA
agtggtcagcacagagtggcta

SEQ ID NO: 6045 - RNA, 22 nt, synthetic construct
  source 1..22: mol_type = other RNA
agtggtccggactcaggagaga

SEQ ID NO: 6046 - RNA, 22 nt, synthetic construct
  source 1..22: mol_type = other RNA
agttaaagcgactccaatgcgg

SEQ ID NO: 6047 - RNA, 22 nt, synthetic construct
  source 1..22: mol_type = other RNA
agttccggcggcacagcaaggg

SEQ ID NO: 6048 - RNA, 22 nt, synthetic construct
  source 1..22: mol_type = other RNA
agttgaagcggctccaattcgg

SEQ ID NO: 6049 - RNA, 22 nt, synthetic construct
  source 1..22: mol_type = other RNA
atagaccagactgagctatggg

SEQ ID NO: 6050 - RNA, 22 nt, synthetic construct
  source 1..22: mol_type = other RNA
atagctcagtctggtctatctg

SEQ ID NO: 6051 - RNA, 22 nt, synthetic construct
  source 1..22: mol_type = other RNA
atagggtggcaaagcccagggc

SEQ ID NO: 6052 - RNA, 22 nt, synthetic construct
  source 1..22: mol_type = other RNA
atcaccgtttttctggacaacc

SEQ ID NO: 6053 - RNA, 22 nt, synthetic construct
  source 1..22: mol_type = other RNA
atcacgtggtgcagcgccgaga

SEQ ID NO: 6054 - RNA, 22 nt, synthetic construct
  source 1..22: mol_type = other RNA
atcatcaccgtttttctggaca

SEQ ID NO: 6055 - RNA, 22 nt, synthetic construct
  source 1..22: mol_type = other RNA
atccacaggagaacggggtgtc

SEQ ID NO: 6056 - RNA, 22 nt, synthetic construct
  source 1..22: mol_type = other RNA
atccctccctcgacttcccctc

SEQ ID NO: 6057 - RNA, 22 nt, synthetic construct
  source 1..22: mol_type = other RNA
atccgctcagaggacatcacgt

SEQ ID NO: 6058 - RNA, 22 nt, synthetic construct
  source 1..22: mol_type = other RNA
atccgtcggagaaggccatcct

SEQ ID NO: 6059 - RNA, 22 nt, synthetic construct
  source 1..22: mol_type = other RNA
atcctaagaaacgagagatggc

SEQ ID NO: 6060 - RNA, 22 nt, synthetic construct
  source 1..22: mol_type = other RNA
atcctccccgtgtctgggtcct

SEQ ID NO: 6061 - RNA, 22 nt, synthetic construct
  source 1..22: mol_type = other RNA
atcctcttgctttctttgcctg

SEQ ID NO: 6062 - RNA, 22 nt, synthetic construct
  source 1..22: mol_type = other RNA
atccttccctgccgcctccttc

SEQ ID NO: 6063 - RNA, 22 nt, synthetic construct
  source 1..22: mol_type = other RNA
atccttgggcagcaacacagca

SEQ ID NO: 6064 - RNA, 22 nt, synthetic construct
  source 1..22: mol_type = other RNA
atcggaagaggggaagtcgagg

SEQ ID NO: 6065 - RNA, 22 nt, synthetic construct
  source 1..22: mol_type = other RNA
atctctcctccctcacccaacc

SEQ ID NO: 6066 - RNA, 22 nt, synthetic construct
  source 1..22: mol_type = other RNA
atctctcgtttcttaggatggc

SEQ ID NO: 6067 - RNA, 22 nt, synthetic construct
  source 1..22: mol_type = other RNA
atctgcctggccctggccattg

SEQ ID NO: 6068 - RNA, 22 nt, synthetic construct
  source 1..22: mol_type = other RNA
atctgggccagccgtagaggtg

SEQ ID NO: 6069 - RNA, 22 nt, synthetic construct
  source 1..22: mol_type = other RNA
atgaaaggagtgagaggtgacc

SEQ ID NO: 6070 - RNA, 22 nt, synthetic construct
  source 1..22: mol_type = other RNA
atgatgcaggcctacaagaagg

SEQ ID NO: 6071 - RNA, 22 nt, synthetic construct
  source 1..22: mol_type = other RNA
atgcaggcctacaagaagggga

SEQ ID NO: 6072 - RNA, 22 nt, synthetic construct
  source 1..22: mol_type = other RNA
atgcaggtcagagaaagcagga

SEQ ID NO: 6073 - RNA, 22 nt, synthetic construct
  source 1..22: mol_type = other RNA
atgcagtcctccttaccatccc

SEQ ID NO: 6074 - RNA, 22 nt, synthetic construct
  source 1..22: mol_type = other RNA
atgcccggagaggacccagaca

SEQ ID NO: 6075 - RNA, 22 nt, synthetic construct
  source 1..22: mol_type = other RNA
atgccgtcttcactcgctgggt

SEQ ID NO: 6076 - RNA, 22 nt, synthetic construct
  source 1..22: mol_type = other RNA
atgcggaagagagtaggtcgaa

SEQ ID NO: 6077 - RNA, 22 nt, synthetic construct
  source 1..22: mol_type = other RNA
atgctctttccggagcacttcc

SEQ ID NO: 6078 - RNA, 22 nt, synthetic construct
  source 1..22: mol_type = other RNA
atgctgacaccccgtcccagtc

SEQ ID NO: 6079 - RNA, 22 nt, synthetic construct
  source 1..22: mol_type = other RNA
atggagaggtggctaaagccag

SEQ ID NO: 6080 - RNA, 22 nt, synthetic construct
  source 1..22: mol_type = other RNA
atggcacaggccccagaaggag

SEQ ID NO: 6081 - RNA, 22 nt, synthetic construct
  source 1..22: mol_type = other RNA
atggccagggccaggcagatag

SEQ ID NO: 6082 - RNA, 22 nt, synthetic construct
  source 1..22: mol_type = other RNA
atggccttctccgacggatgtc

SEQ ID NO: 6083 - RNA, 22 nt, synthetic construct
  source 1..22: mol_type = other RNA
atgggagctggctcaggttcag

SEQ ID NO: 6084 - RNA, 22 nt, synthetic construct
  source 1..22: mol_type = other RNA
atggggttgggtgagggaggag

SEQ ID NO: 6085 - RNA, 22 nt, synthetic construct
  source 1..22: mol_type = other RNA
atgggtcagcacaggctgccaa

SEQ ID NO: 6086 - RNA, 22 nt, synthetic construct
  source 1..22: mol_type = other RNA
atggtaaggaggactgcatggg

SEQ ID NO: 6087 - RNA, 22 nt, synthetic construct
  source 1..22: mol_type = other RNA
atggtaaggaggcctggggcag

SEQ ID NO: 6088 - RNA, 22 nt, synthetic construct
  source 1..22: mol_type = other RNA
atggtaagggggactgggacgg

SEQ ID NO: 6089 - RNA, 22 nt, synthetic construct
  source 1..22: mol_type = other RNA
atgtcctctgagcggatcctcc

SEQ ID NO: 6090 - RNA, 22 nt, synthetic construct
  source 1..22: mol_type = other RNA
atgtctcccttgcgtcccgcct

SEQ ID NO: 6091 - RNA, 22 nt, synthetic construct
  source 1..22: mol_type = other RNA
atgttgagcccctccagccggt

SEQ ID NO: 6092 - RNA, 22 nt, synthetic construct
  source 1..22: mol_type = other RNA
attccccttcgaccaccccact

SEQ ID NO: 6093 - RNA, 22 nt, synthetic construct
  source 1..22: mol_type = other RNA
attccccttcgacctactctct

SEQ ID NO: 6094 - RNA, 22 nt, synthetic construct
  source 1..22: mol_type = other RNA
attcggaagtggggtggtcgaa

SEQ ID NO: 6095 - RNA, 22 nt, synthetic construct
  source 1..22: mol_type = other RNA
attcgggtcacctctcactcct

SEQ ID NO: 6096 - RNA, 22 nt, synthetic construct
  source 1..22: mol_type = other RNA
attctctcccctgggcctgtgc

SEQ ID NO: 6097 - RNA, 22 nt, synthetic construct
  source 1..22: mol_type = other RNA
attggagccgcttcaactggcc

SEQ ID NO: 6098 - RNA, 22 nt, synthetic construct
  source 1..22: mol_type = other RNA
attggagtcgctttaactggcc

SEQ ID NO: 6099 - RNA, 22 nt, synthetic construct
  source 1..22: mol_type = other RNA
attgtcactttgcgctgccctc

SEQ ID NO: 6100 - RNA, 22 nt, synthetic construct
  source 1..22: mol_type = other RNA
atttgggcagctcccctacccc

SEQ ID NO: 6101 - RNA, 22 nt, synthetic construct
  source 1..22: mol_type = other RNA
caaagaaagcaagaggatggag

SEQ ID NO: 6102 - RNA, 22 nt, synthetic construct
  source 1..22: mol_type = other RNA
caaagccagggccagttaaagc

SEQ ID NO: 6103 - RNA, 22 nt, synthetic construct
  source 1..22: mol_type = other RNA
caaagtaccccgtctccctggc

SEQ ID NO: 6104 - RNA, 22 nt, synthetic construct
  source 1..22: mol_type = other RNA
caaagtccaggaccggctggag

SEQ ID NO: 6105 - RNA, 22 nt, synthetic construct
  source 1..22: mol_type = other RNA
caaagtgacaatggccagggcc

SEQ ID NO: 6106 - RNA, 22 nt, synthetic construct
  source 1..22: mol_type = other RNA
caaagtggtccggactcaggag

SEQ ID NO: 6107 - RNA, 22 nt, synthetic construct
  source 1..22: mol_type = other RNA
caaatgaaaggagtgagaggtg

SEQ ID NO: 6108 - RNA, 22 nt, synthetic construct
  source 1..22: mol_type = other RNA
caacacagcagagagcaagggg

SEQ ID NO: 6109 - RNA, 22 nt, synthetic construct
  source 1..22: mol_type = other RNA
caacatcggaagaggggaagtc

SEQ ID NO: 6110 - RNA, 22 nt, synthetic construct
  source 1..22: mol_type = other RNA
caaccccaaagtaccccgtctc

SEQ ID NO: 6111 - RNA, 22 nt, synthetic construct
  source 1..22: mol_type = other RNA
caaccccatgccgtcttcactc

SEQ ID NO: 6112 - RNA, 22 nt, synthetic construct
  source 1..22: mol_type = other RNA
caactggccctgggcttagcca

SEQ ID NO: 6113 - RNA, 22 nt, synthetic construct
  source 1..22: mol_type = other RNA
caagaaggggaggcgggacgca

SEQ ID NO: 6114 - RNA, 22 nt, synthetic construct
  source 1..22: mol_type = other RNA
caagaggatggagaggtggcta

SEQ ID NO: 6115 - RNA, 22 nt, synthetic construct
  source 1..22: mol_type = other RNA
caagctgcagacagaaagcggc

SEQ ID NO: 6116 - RNA, 22 nt, synthetic construct
  source 1..22: mol_type = other RNA
caaggatgctctttccggagca

SEQ ID NO: 6117 - RNA, 22 nt, synthetic construct
  source 1..22: mol_type = other RNA
caagggagacatccgtcggaga

SEQ ID NO: 6118 - RNA, 22 nt, synthetic construct
  source 1..22: mol_type = other RNA
caagggcactcgggggcgagag

SEQ ID NO: 6119 - RNA, 22 nt, synthetic construct
  source 1..22: mol_type = other RNA
caaggggaagagggagtggagg

SEQ ID NO: 6120 - RNA, 22 nt, synthetic construct
  source 1..22: mol_type = other RNA
caatgcggaagagagtaggtcg

SEQ ID NO: 6121 - RNA, 22 nt, synthetic construct
  source 1..22: mol_type = other RNA
caatggccagggccaggcagat

SEQ ID NO: 6122 - RNA, 22 nt, synthetic construct
  source 1..22: mol_type = other RNA
caattcggaagtggggtggtcg

SEQ ID NO: 6123 - RNA, 22 nt, synthetic construct
  source 1..22: mol_type = other RNA
cacaagctgcagacagaaagcg

SEQ ID NO: 6124 - RNA, 22 nt, synthetic construct
  source 1..22: mol_type = other RNA
cacagactagagaggtaagggg

SEQ ID NO: 6125 - RNA, 22 nt, synthetic construct
  source 1..22: mol_type = other RNA
cacagagtggctaagcccaggg

SEQ ID NO: 6126 - RNA, 22 nt, synthetic construct
  source 1..22: mol_type = other RNA
cacagcaagggcactcgggggc

SEQ ID NO: 6127 - RNA, 22 nt, synthetic construct
  source 1..22: mol_type = other RNA
cacagcagagagcaaggggaag

SEQ ID NO: 6128 - RNA, 22 nt, synthetic construct
  source 1..22: mol_type = other RNA
cacaggagaacggggtgtccag

SEQ ID NO: 6129 - RNA, 22 nt, synthetic construct
  source 1..22: mol_type = other RNA
cacaggcccaggggagagaatg

SEQ ID NO: 6130 - RNA, 22 nt, synthetic construct
  source 1..22: mol_type = other RNA
cacaggccccagaaggagaagg

SEQ ID NO: 6131 - RNA, 22 nt, synthetic construct
  source 1..22: mol_type = other RNA
cacaggctgccaaagccagggc

SEQ ID NO: 6132 - RNA, 22 nt, synthetic construct
  source 1..22: mol_type = other RNA
caccacgtgatgtcctctgagc

SEQ ID NO: 6133 - RNA, 22 nt, synthetic construct
  source 1..22: mol_type = other RNA
cacccaaccccatgccgtcttc

SEQ ID NO: 6134 - RNA, 22 nt, synthetic construct
  source 1..22: mol_type = other RNA
caccccacttccgaattggagc

SEQ ID NO: 6135 - RNA, 22 nt, synthetic construct
  source 1..22: mol_type = other RNA
caccccgtcccagtccccctta

SEQ ID NO: 6136 - RNA, 22 nt, synthetic construct
  source 1..22: mol_type = other RNA
caccccgttctcctgtggattc

SEQ ID NO: 6137 - RNA, 22 nt, synthetic construct
  source 1..22: mol_type = other RNA
caccctatgctgacaccccgtc

SEQ ID NO: 6138 - RNA, 22 nt, synthetic construct
  source 1..22: mol_type = other RNA
caccgtttttctggacaacccc

SEQ ID NO: 6139 - RNA, 22 nt, synthetic construct
  source 1..22: mol_type = other RNA
cacctctacggctggcccagat

SEQ ID NO: 6140 - RNA, 22 nt, synthetic construct
  source 1..22: mol_type = other RNA
cacctctcactcctttcatttg

SEQ ID NO: 6141 - RNA, 22 nt, synthetic construct
  source 1..22: mol_type = other RNA
cacctctccatcctcttgcttt

SEQ ID NO: 6142 - RNA, 22 nt, synthetic construct
  source 1..22: mol_type = other RNA
cacggggaggatccgctcagag

SEQ ID NO: 6143 - RNA, 22 nt, synthetic construct
  source 1..22: mol_type = other RNA
cacgtgatgtcctctgagcgga

SEQ ID NO: 6144 - RNA, 22 nt, synthetic construct
  source 1..22: mol_type = other RNA
cacgtggtgcagcgccgagaag

SEQ ID NO: 6145 - RNA, 22 nt, synthetic construct
  source 1..22: mol_type = other RNA
cactccctcttccccttgctct

SEQ ID NO: 6146 - RNA, 22 nt, synthetic construct
  source 1..22: mol_type = other RNA
cactcctttcatttgggcagct

SEQ ID NO: 6147 - RNA, 22 nt, synthetic construct
  source 1..22: mol_type = other RNA
cactcgctgggttcccttttcc

SEQ ID NO: 6148 - RNA, 22 nt, synthetic construct
  source 1..22: mol_type = other RNA
cactcgggggcgagaggagggc

SEQ ID NO: 6149 - RNA, 22 nt, synthetic construct
  source 1..22: mol_type = other RNA
cactctgccccaggcctcctta

SEQ ID NO: 6150 - RNA, 22 nt, synthetic construct
  source 1..22: mol_type = other RNA
cactctgtgctgaccactctgc

SEQ ID NO: 6151 - RNA, 22 nt, synthetic construct
  source 1..22: mol_type = other RNA
cactgtttccccttcccaggca

SEQ ID NO: 6152 - RNA, 22 nt, synthetic construct
  source 1..22: mol_type = other RNA
cacttccgaattggagccgctt

SEQ ID NO: 6153 - RNA, 22 nt, synthetic construct
  source 1..22: mol_type = other RNA
cacttccttctcggcgctgcac

SEQ ID NO: 6154 - RNA, 22 nt, synthetic construct
  source 1..22: mol_type = other RNA
cactttgagctctactggcttc

SEQ ID NO: 6155 - RNA, 22 nt, synthetic construct
  source 1..22: mol_type = other RNA
cactttgcgctgccctcctctc

SEQ ID NO: 6156 - RNA, 22 nt, synthetic construct
  source 1..22: mol_type = other RNA
cagaaaaacggtgatgatgcag

SEQ ID NO: 6157 - RNA, 22 nt, synthetic construct
  source 1..22: mol_type = other RNA
cagaaagcggcacaggcccagg

SEQ ID NO: 6158 - RNA, 22 nt, synthetic construct
  source 1..22: mol_type = other RNA
cagaagccagtagagctcaaag

SEQ ID NO: 6159 - RNA, 22 nt, synthetic construct
  source 1..22: mol_type = other RNA
cagaaggagaaggaaaagggaa

SEQ ID NO: 6160 - RNA, 22 nt, synthetic construct
  source 1..22: mol_type = other RNA
cagacacggggaggatccgctc

SEQ ID NO: 6161 - RNA, 22 nt, synthetic construct
  source 1..22: mol_type = other RNA
cagacagaaagcggcacaggcc

SEQ ID NO: 6162 - RNA, 22 nt, synthetic construct
  source 1..22: mol_type = other RNA
cagactagagaggtaagggggg

SEQ ID NO: 6163 - RNA, 22 nt, synthetic construct
  source 1..22: mol_type = other RNA
cagactgagctatgggagctgg

SEQ ID NO: 6164 - RNA, 22 nt, synthetic construct
  source 1..22: mol_type = other RNA
cagagaaagcaggacctgcctg

SEQ ID NO: 6165 - RNA, 22 nt, synthetic construct
  source 1..22: mol_type = other RNA
cagagagcaaggggaagaggga

SEQ ID NO: 6166 - RNA, 22 nt, synthetic construct
  source 1..22: mol_type = other RNA
cagaggacatcacgtggtgcag

SEQ ID NO: 6167 - RNA, 22 nt, synthetic construct
  source 1..22: mol_type = other RNA
cagaggcggcgcagaagccagt

SEQ ID NO: 6168 - RNA, 22 nt, synthetic construct
  source 1..22: mol_type = other RNA
cagagtggctaagcccagggcc

SEQ ID NO: 6169 - RNA, 22 nt, synthetic construct
  source 1..22: mol_type = other RNA
cagagtggtcagcacagagtgg

SEQ ID NO: 6170 - RNA, 22 nt, synthetic construct
  source 1..22: mol_type = other RNA
cagagttccggcggcacagcaa

SEQ ID NO: 6171 - RNA, 22 nt, synthetic construct
  source 1..22: mol_type = other RNA
cagatagaccagactgagctat

SEQ ID NO: 6172 - RNA, 22 nt, synthetic construct
  source 1..22: mol_type = other RNA
cagatccttccctgccgcctcc

SEQ ID NO: 6173 - RNA, 22 nt, synthetic construct
  source 1..22: mol_type = other RNA
cagcaacacagcagagagcaag

SEQ ID NO: 6174 - RNA, 22 nt, synthetic construct
  source 1..22: mol_type = other RNA
cagcaagggcactcgggggcga

SEQ ID NO: 6175 - RNA, 22 nt, synthetic construct
  source 1..22: mol_type = other RNA
cagcacagagtggctaagccca

SEQ ID NO: 6176 - RNA, 22 nt, synthetic construct
  source 1..22: mol_type = other RNA
cagcacaggctgccaaagccag

SEQ ID NO: 6177 - RNA, 22 nt, synthetic construct
  source 1..22: mol_type = other RNA
cagcagagagcaaggggaagag

SEQ ID NO: 6178 - RNA, 22 nt, synthetic construct
  source 1..22: mol_type = other RNA
cagcatagggtggcaaagccca

SEQ ID NO: 6179 - RNA, 22 nt, synthetic construct
  source 1..22: mol_type = other RNA
cagccggtcctggactttgtct

SEQ ID NO: 6180 - RNA, 22 nt, synthetic construct
  source 1..22: mol_type = other RNA
cagccgtagaggtgacccaggc

SEQ ID NO: 6181 - RNA, 22 nt, synthetic construct
  source 1..22: mol_type = other RNA
cagcctgtgctgacccatgcag

SEQ ID NO: 6182 - RNA, 22 nt, synthetic construct
  source 1..22: mol_type = other RNA
cagcgagtgaagacggcatggg

SEQ ID NO: 6183 - RNA, 22 nt, synthetic construct
  source 1..22: mol_type = other RNA
cagcgcaaagtgacaatggcca

SEQ ID NO: 6184 - RNA, 22 nt, synthetic construct
  source 1..22: mol_type = other RNA
cagcgccgagaaggaagtgctc

SEQ ID NO: 6185 - RNA, 22 nt, synthetic construct
  source 1..22: mol_type = other RNA
cagcgttagagggcagagttcc

SEQ ID NO: 6186 - RNA, 22 nt, synthetic construct
  source 1..22: mol_type = other RNA
cagctcccatagctcagtctgg

SEQ ID NO: 6187 - RNA, 22 nt, synthetic construct
  source 1..22: mol_type = other RNA
cagctcccctaccccccttacc

SEQ ID NO: 6188 - RNA, 22 nt, synthetic construct
  source 1..22: mol_type = other RNA
cagcttgtggcctgggtcacct

SEQ ID NO: 6189 - RNA, 22 nt, synthetic construct
  source 1..22: mol_type = other RNA
caggaccggctggaggggctca

SEQ ID NO: 6190 - RNA, 22 nt, synthetic construct
  source 1..22: mol_type = other RNA
caggacctgcctgggaagggga

SEQ ID NO: 6191 - RNA, 22 nt, synthetic construct
  source 1..22: mol_type = other RNA
caggagaacggggtgtccaggc

SEQ ID NO: 6192 - RNA, 22 nt, synthetic construct
  source 1..22: mol_type = other RNA
caggagagagacggcagcgtta

SEQ ID NO: 6193 - RNA, 22 nt, synthetic construct
  source 1..22: mol_type = other RNA
caggagagggcagggcagggaa

SEQ ID NO: 6194 - RNA, 22 nt, synthetic construct
  source 1..22: mol_type = other RNA
caggcaaagaaagcaagaggat

SEQ ID NO: 6195 - RNA, 22 nt, synthetic construct
  source 1..22: mol_type = other RNA
caggcagatagaccagactgag

SEQ ID NO: 6196 - RNA, 22 nt, synthetic construct
  source 1..22: mol_type = other RNA
caggcaggtcctgctttctctg

SEQ ID NO: 6197 - RNA, 22 nt, synthetic construct
  source 1..22: mol_type = other RNA
caggccacaagctgcagacaga

SEQ ID NO: 6198 - RNA, 22 nt, synthetic construct
  source 1..22: mol_type = other RNA
caggcccaggggagagaatgca

SEQ ID NO: 6199 - RNA, 22 nt, synthetic construct
  source 1..22: mol_type = other RNA
caggccccagaaggagaaggaa

SEQ ID NO: 6200 - RNA, 22 nt, synthetic construct
  source 1..22: mol_type = other RNA
caggcctacaagaaggggaggc

SEQ ID NO: 6201 - RNA, 22 nt, synthetic construct
  source 1..22: mol_type = other RNA
caggcctccttaccattcccct

SEQ ID NO: 6202 - RNA, 22 nt, synthetic construct
  source 1..22: mol_type = other RNA
caggctgccaaagccagggcca

SEQ ID NO: 6203 - RNA, 22 nt, synthetic construct
  source 1..22: mol_type = other RNA
cagggaaggagacaaagtccag

SEQ ID NO: 6204 - RNA, 22 nt, synthetic construct
  source 1..22: mol_type = other RNA
cagggaaggatctgggccagcc

SEQ ID NO: 6205 - RNA, 22 nt, synthetic construct
  source 1..22: mol_type = other RNA
cagggagacggggtactttggg

SEQ ID NO: 6206 - RNA, 22 nt, synthetic construct
  source 1..22: mol_type = other RNA
cagggcagggaaggagacaaag

SEQ ID NO: 6207 - RNA, 22 nt, synthetic construct
  source 1..22: mol_type = other RNA
cagggccaggcagatagaccag

SEQ ID NO: 6208 - RNA, 22 nt, synthetic construct
  source 1..22: mol_type = other RNA
cagggccagttaaagcgactcc

SEQ ID NO: 6209 - RNA, 22 nt, synthetic construct
  source 1..22: mol_type = other RNA
cagggccagttgaagcggctcc

SEQ ID NO: 6210 - RNA, 22 nt, synthetic construct
  source 1..22: mol_type = other RNA
caggggagagaatgcaggtcag

SEQ ID NO: 6211 - RNA, 22 nt, synthetic construct
  source 1..22: mol_type = other RNA
caggtcagagaaagcaggacct

SEQ ID NO: 6212 - RNA, 22 nt, synthetic construct
  source 1..22: mol_type = other RNA
caggtcctgctttctctgacct

SEQ ID NO: 6213 - RNA, 22 nt, synthetic construct
  source 1..22: mol_type = other RNA
caggttcaggagagggcagggc

SEQ ID NO: 6214 - RNA, 22 nt, synthetic construct
  source 1..22: mol_type = other RNA
caggttccgtcttcctccactc

SEQ ID NO: 6215 - RNA, 22 nt, synthetic construct
  source 1..22: mol_type = other RNA
cagtagagctcaaagtggtccg

SEQ ID NO: 6216 - RNA, 22 nt, synthetic construct
  source 1..22: mol_type = other RNA
cagtcccccttaccattcccct

SEQ ID NO: 6217 - RNA, 22 nt, synthetic construct
  source 1..22: mol_type = other RNA
cagtcctccttaccatccctcc

SEQ ID NO: 6218 - RNA, 22 nt, synthetic construct
  source 1..22: mol_type = other RNA
cagtctggtctatctgcctggc

SEQ ID NO: 6219 - RNA, 22 nt, synthetic construct
  source 1..22: mol_type = other RNA
cagtgggccagaggcggcgcag

SEQ ID NO: 6220 - RNA, 22 nt, synthetic construct
  source 1..22: mol_type = other RNA
cagttaaagcgactccaatgcg

SEQ ID NO: 6221 - RNA, 22 nt, synthetic construct
  source 1..22: mol_type = other RNA
cagttgaagcggctccaattcg

SEQ ID NO: 6222 - RNA, 22 nt, synthetic construct
  source 1..22: mol_type = other RNA
catagctcagtctggtctatct

SEQ ID NO: 6223 - RNA, 22 nt, synthetic construct
  source 1..22: mol_type = other RNA
catagggtggcaaagcccaggg

SEQ ID NO: 6224 - RNA, 22 nt, synthetic construct
  source 1..22: mol_type = other RNA
catcaccgtttttctggacaac

SEQ ID NO: 6225 - RNA, 22 nt, synthetic construct
  source 1..22: mol_type = other RNA
catcacgtggtgcagcgccgag

SEQ ID NO: 6226 - RNA, 22 nt, synthetic construct
  source 1..22: mol_type = other RNA
catcatcaccgtttttctggac

SEQ ID NO: 6227 - RNA, 22 nt, synthetic construct
  source 1..22: mol_type = other RNA
catccctccctcgacttcccct

SEQ ID NO: 6228 - RNA, 22 nt, synthetic construct
  source 1..22: mol_type = other RNA
catccgtcggagaaggccatcc

SEQ ID NO: 6229 - RNA, 22 nt, synthetic construct
  source 1..22: mol_type = other RNA
catcctaagaaacgagagatgg

SEQ ID NO: 6230 - RNA, 22 nt, synthetic construct
  source 1..22: mol_type = other RNA
catcctcttgctttctttgcct

SEQ ID NO: 6231 - RNA, 22 nt, synthetic construct
  source 1..22: mol_type = other RNA
catccttgggcagcaacacagc

SEQ ID NO: 6232 - RNA, 22 nt, synthetic construct
  source 1..22: mol_type = other RNA
catcggaagaggggaagtcgag

SEQ ID NO: 6233 - RNA, 22 nt, synthetic construct
  source 1..22: mol_type = other RNA
catctctcctccctcacccaac

SEQ ID NO: 6234 - RNA, 22 nt, synthetic construct
  source 1..22: mol_type = other RNA
catctctcgtttcttaggatgg

SEQ ID NO: 6235 - RNA, 22 nt, synthetic construct
  source 1..22: mol_type = other RNA
catgcagtcctccttaccatcc

SEQ ID NO: 6236 - RNA, 22 nt, synthetic construct
  source 1..22: mol_type = other RNA
catgccgtcttcactcgctggg

SEQ ID NO: 6237 - RNA, 22 nt, synthetic construct
  source 1..22: mol_type = other RNA
catggggttgggtgagggagga

SEQ ID NO: 6238 - RNA, 22 nt, synthetic construct
  source 1..22: mol_type = other RNA
catgggtcagcacaggctgcca

SEQ ID NO: 6239 - RNA, 22 nt, synthetic construct
  source 1..22: mol_type = other RNA
cattccccttcgaccaccccac

SEQ ID NO: 6240 - RNA, 22 nt, synthetic construct
  source 1..22: mol_type = other RNA
cattccccttcgacctactctc

SEQ ID NO: 6241 - RNA, 22 nt, synthetic construct
  source 1..22: mol_type = other RNA
cattctctcccctgggcctgtg

SEQ ID NO: 6242 - RNA, 22 nt, synthetic construct
  source 1..22: mol_type = other RNA
cattggagtcgctttaactggc

SEQ ID NO: 6243 - RNA, 22 nt, synthetic construct
  source 1..22: mol_type = other RNA
cattgtcactttgcgctgccct

SEQ ID NO: 6244 - RNA, 22 nt, synthetic construct
  source 1..22: mol_type = other RNA
catttgggcagctcccctaccc

SEQ ID NO: 6245 - RNA, 22 nt, synthetic construct
  source 1..22: mol_type = other RNA
ccaaagccagggccagttaaag

SEQ ID NO: 6246 - RNA, 22 nt, synthetic construct
  source 1..22: mol_type = other RNA
ccaaagtaccccgtctccctgg

SEQ ID NO: 6247 - RNA, 22 nt, synthetic construct
  source 1..22: mol_type = other RNA
ccaaatgaaaggagtgagaggt

SEQ ID NO: 6248 - RNA, 22 nt, synthetic construct
  source 1..22: mol_type = other RNA
ccaaccccatgccgtcttcact

SEQ ID NO: 6249 - RNA, 22 nt, synthetic construct
  source 1..22: mol_type = other RNA
ccaaggatgctctttccggagc

SEQ ID NO: 6250 - RNA, 22 nt, synthetic construct
  source 1..22: mol_type = other RNA
ccaatgcggaagagagtaggtc

SEQ ID NO: 6251 - RNA, 22 nt, synthetic construct
  source 1..22: mol_type = other RNA
ccaattcggaagtggggtggtc

SEQ ID NO: 6252 - RNA, 22 nt, synthetic construct
  source 1..22: mol_type = other RNA
ccacaagctgcagacagaaagc

SEQ ID NO: 6253 - RNA, 22 nt, synthetic construct
  source 1..22: mol_type = other RNA
ccacaggagaacggggtgtcca

SEQ ID NO: 6254 - RNA, 22 nt, synthetic construct
  source 1..22: mol_type = other RNA
ccaccccacttccgaattggag

SEQ ID NO: 6255 - RNA, 22 nt, synthetic construct
  source 1..22: mol_type = other RNA
ccaccctatgctgacaccccgt

SEQ ID NO: 6256 - RNA, 22 nt, synthetic construct
  source 1..22: mol_type = other RNA
ccacctctccatcctcttgctt

SEQ ID NO: 6257 - RNA, 22 nt, synthetic construct
  source 1..22: mol_type = other RNA
ccacgtgatgtcctctgagcgg

SEQ ID NO: 6258 - RNA, 22 nt, synthetic construct
  source 1..22: mol_type = other RNA
ccactccctcttccccttgctc

SEQ ID NO: 6259 - RNA, 22 nt, synthetic construct
  source 1..22: mol_type = other RNA
ccactctgccccaggcctcctt

SEQ ID NO: 6260 - RNA, 22 nt, synthetic construct
  source 1..22: mol_type = other RNA
ccactctgtgctgaccactctg

SEQ ID NO: 6261 - RNA, 22 nt, synthetic construct
  source 1..22: mol_type = other RNA
ccactgtttccccttcccaggc

SEQ ID NO: 6262 - RNA, 22 nt, synthetic construct
  source 1..22: mol_type = other RNA
ccacttccgaattggagccgct

SEQ ID NO: 6263 - RNA, 22 nt, synthetic construct
  source 1..22: mol_type = other RNA
ccactttgagctctactggctt

SEQ ID NO: 6264 - RNA, 22 nt, synthetic construct
  source 1..22: mol_type = other RNA
ccagaaaaacggtgatgatgca

SEQ ID NO: 6265 - RNA, 22 nt, synthetic construct
  source 1..22: mol_type = other RNA
ccagaaggagaaggaaaaggga

SEQ ID NO: 6266 - RNA, 22 nt, synthetic construct
  source 1..22: mol_type = other RNA
ccagacacggggaggatccgct

SEQ ID NO: 6267 - RNA, 22 nt, synthetic construct
  source 1..22: mol_type = other RNA
ccagactgagctatgggagctg

SEQ ID NO: 6268 - RNA, 22 nt, synthetic construct
  source 1..22: mol_type = other RNA
ccagaggcggcgcagaagccag

SEQ ID NO: 6269 - RNA, 22 nt, synthetic construct
  source 1..22: mol_type = other RNA
ccagatccttccctgccgcctc

SEQ ID NO: 6270 - RNA, 22 nt, synthetic construct
  source 1..22: mol_type = other RNA
ccagccggtcctggactttgtc

SEQ ID NO: 6271 - RNA, 22 nt, synthetic construct
  source 1..22: mol_type = other RNA
ccagccgtagaggtgacccagg

SEQ ID NO: 6272 - RNA, 22 nt, synthetic construct
  source 1..22: mol_type = other RNA
ccagcgagtgaagacggcatgg

SEQ ID NO: 6273 - RNA, 22 nt, synthetic construct
  source 1..22: mol_type = other RNA
ccagctcccatagctcagtctg

SEQ ID NO: 6274 - RNA, 22 nt, synthetic construct
  source 1..22: mol_type = other RNA
ccaggaccggctggaggggctc

SEQ ID NO: 6275 - RNA, 22 nt, synthetic construct
  source 1..22: mol_type = other RNA
ccaggcaaagaaagcaagagga

SEQ ID NO: 6276 - RNA, 22 nt, synthetic construct
  source 1..22: mol_type = other RNA
ccaggcagatagaccagactga

SEQ ID NO: 6277 - RNA, 22 nt, synthetic construct
  source 1..22: mol_type = other RNA
ccaggcaggtcctgctttctct

SEQ ID NO: 6278 - RNA, 22 nt, synthetic construct
  source 1..22: mol_type = other RNA
ccaggccacaagctgcagacag

SEQ ID NO: 6279 - RNA, 22 nt, synthetic construct
  source 1..22: mol_type = other RNA
ccaggcctccttaccattcccc

SEQ ID NO: 6280 - RNA, 22 nt, synthetic construct
  source 1..22: mol_type = other RNA
ccagggagacggggtactttgg

SEQ ID NO: 6281 - RNA, 22 nt, synthetic construct
  source 1..22: mol_type = other RNA
ccagggccaggcagatagacca

SEQ ID NO: 6282 - RNA, 22 nt, synthetic construct
  source 1..22: mol_type = other RNA
ccagggccagttaaagcgactc

SEQ ID NO: 6283 - RNA, 22 nt, synthetic construct
  source 1..22: mol_type = other RNA
ccagggccagttgaagcggctc

SEQ ID NO: 6284 - RNA, 22 nt, synthetic construct
  source 1..22: mol_type = other RNA
ccaggggagagaatgcaggtca

SEQ ID NO: 6285 - RNA, 22 nt, synthetic construct
  source 1..22: mol_type = other RNA
ccagtagagctcaaagtggtcc

SEQ ID NO: 6286 - RNA, 22 nt, synthetic construct
  source 1..22: mol_type = other RNA
ccagtcccccttaccattcccc

SEQ ID NO: 6287 - RNA, 22 nt, synthetic construct
  source 1..22: mol_type = other RNA
ccagttaaagcgactccaatgc

SEQ ID NO: 6288 - RNA, 22 nt, synthetic construct
  source 1..22: mol_type = other RNA
ccagttgaagcggctccaattc

SEQ ID NO: 6289 - RNA, 22 nt, synthetic construct
  source 1..22: mol_type = other RNA
ccatagctcagtctggtctatc

SEQ ID NO: 6290 - RNA, 22 nt, synthetic construct
  source 1..22: mol_type = other RNA
ccatccctccctcgacttcccc

SEQ ID NO: 6291 - RNA, 22 nt, synthetic construct
  source 1..22: mol_type = other RNA
ccatcctaagaaacgagagatg

SEQ ID NO: 6292 - RNA, 22 nt, synthetic construct
  source 1..22: mol_type = other RNA
ccatcctcttgctttctttgcc

SEQ ID NO: 6293 - RNA, 22 nt, synthetic construct
  source 1..22: mol_type = other RNA
ccatctctcgtttcttaggatg

SEQ ID NO: 6294 - RNA, 22 nt, synthetic construct
  source 1..22: mol_type = other RNA
ccatgcagtcctccttaccatc

SEQ ID NO: 6295 - RNA, 22 nt, synthetic construct
  source 1..22: mol_type = other RNA
ccatgccgtcttcactcgctgg

SEQ ID NO: 6296 - RNA, 22 nt, synthetic construct
  source 1..22: mol_type = other RNA
ccattccccttcgaccacccca

SEQ ID NO: 6297 - RNA, 22 nt, synthetic construct
  source 1..22: mol_type = other RNA
ccattccccttcgacctactct

SEQ ID NO: 6298 - RNA, 22 nt, synthetic construct
  source 1..22: mol_type = other RNA
ccattgtcactttgcgctgccc

SEQ ID NO: 6299 - RNA, 22 nt, synthetic construct
  source 1..22: mol_type = other RNA
cccaaagtaccccgtctccctg

SEQ ID NO: 6300 - RNA, 22 nt, synthetic construct
  source 1..22: mol_type = other RNA
cccaaatgaaaggagtgagagg

SEQ ID NO: 6301 - RNA, 22 nt, synthetic construct
  source 1..22: mol_type = other RNA
cccaaccccatgccgtcttcac

SEQ ID NO: 6302 - RNA, 22 nt, synthetic construct
  source 1..22: mol_type = other RNA
cccaaggatgctctttccggag

SEQ ID NO: 6303 - RNA, 22 nt, synthetic construct
  source 1..22: mol_type = other RNA
cccactgtttccccttcccagg

SEQ ID NO: 6304 - RNA, 22 nt, synthetic construct
  source 1..22: mol_type = other RNA
cccacttccgaattggagccgc

SEQ ID NO: 6305 - RNA, 22 nt, synthetic construct
  source 1..22: mol_type = other RNA
cccagaaggagaaggaaaaggg

SEQ ID NO: 6306 - RNA, 22 nt, synthetic construct
  source 1..22: mol_type = other RNA
cccagacacggggaggatccgc

SEQ ID NO: 6307 - RNA, 22 nt, synthetic construct
  source 1..22: mol_type = other RNA
cccagatccttccctgccgcct

SEQ ID NO: 6308 - RNA, 22 nt, synthetic construct
  source 1..22: mol_type = other RNA
cccagcgagtgaagacggcatg

SEQ ID NO: 6309 - RNA, 22 nt, synthetic construct
  source 1..22: mol_type = other RNA
cccaggcaggtcctgctttctc

SEQ ID NO: 6310 - RNA, 22 nt, synthetic construct
  source 1..22: mol_type = other RNA
cccaggccacaagctgcagaca

SEQ ID NO: 6311 - RNA, 22 nt, synthetic construct
  source 1..22: mol_type = other RNA
cccaggcctccttaccattccc

SEQ ID NO: 6312 - RNA, 22 nt, synthetic construct
  source 1..22: mol_type = other RNA
cccagggccagttgaagcggct

SEQ ID NO: 6313 - RNA, 22 nt, synthetic construct
  source 1..22: mol_type = other RNA
cccaggggagagaatgcaggtc

SEQ ID NO: 6314 - RNA, 22 nt, synthetic construct
  source 1..22: mol_type = other RNA
cccagtcccccttaccattccc

SEQ ID NO: 6315 - RNA, 22 nt, synthetic construct
  source 1..22: mol_type = other RNA
cccatagctcagtctggtctat

SEQ ID NO: 6316 - RNA, 22 nt, synthetic construct
  source 1..22: mol_type = other RNA
cccatgcagtcctccttaccat

SEQ ID NO: 6317 - RNA, 22 nt, synthetic construct
  source 1..22: mol_type = other RNA
cccatgccgtcttcactcgctg

SEQ ID NO: 6318 - RNA, 22 nt, synthetic construct
  source 1..22: mol_type = other RNA
ccccaaagtaccccgtctccct

SEQ ID NO: 6319 - RNA, 22 nt, synthetic construct
  source 1..22: mol_type = other RNA
ccccacttccgaattggagccg

SEQ ID NO: 6320 - RNA, 22 nt, synthetic construct
  source 1..22: mol_type = other RNA
ccccagaaggagaaggaaaagg

SEQ ID NO: 6321 - RNA, 22 nt, synthetic construct
  source 1..22: mol_type = other RNA
ccccaggcctccttaccattcc

SEQ ID NO: 6322 - RNA, 22 nt, synthetic construct
  source 1..22: mol_type = other RNA
ccccatgccgtcttcactcgct

SEQ ID NO: 6323 - RNA, 22 nt, synthetic construct
  source 1..22: mol_type = other RNA
ccccccttacctctctagtctg

SEQ ID NO: 6324 - RNA, 22 nt, synthetic construct
  source 1..22: mol_type = other RNA
cccccgagtgcccttgctgtgc

SEQ ID NO: 6325 - RNA, 22 nt, synthetic construct
  source 1..22: mol_type = other RNA
cccccttaccattccccttcga

SEQ ID NO: 6326 - RNA, 22 nt, synthetic construct
  source 1..22: mol_type = other RNA
cccccttacctctctagtctgt

SEQ ID NO: 6327 - RNA, 22 nt, synthetic construct
  source 1..22: mol_type = other RNA
ccccgagtgcccttgctgtgcc

SEQ ID NO: 6328 - RNA, 22 nt, synthetic construct
  source 1..22: mol_type = other RNA
ccccgtcccagtcccccttacc

SEQ ID NO: 6329 - RNA, 22 nt, synthetic construct
  source 1..22: mol_type = other RNA
ccccgtcgttcctggccctggg

SEQ ID NO: 6330 - RNA, 22 nt, synthetic construct
  source 1..22: mol_type = other RNA
ccccgtctccctggctttagcc

SEQ ID NO: 6331 - RNA, 22 nt, synthetic construct
  source 1..22: mol_type = other RNA
ccccgtgtctgggtcctctccg

SEQ ID NO: 6332 - RNA, 22 nt, synthetic construct
  source 1..22: mol_type = other RNA
ccccgttctcctgtggattcgg

SEQ ID NO: 6333 - RNA, 22 nt, synthetic construct
  source 1..22: mol_type = other RNA
cccctaccccccttacctctct

SEQ ID NO: 6334 - RNA, 22 nt, synthetic construct
  source 1..22: mol_type = other RNA
cccctccagccggtcctggact

SEQ ID NO: 6335 - RNA, 22 nt, synthetic construct
  source 1..22: mol_type = other RNA
cccctcttccgatgttgagccc

SEQ ID NO: 6336 - RNA, 22 nt, synthetic construct
  source 1..22: mol_type = other RNA
cccctgggcctgtgccgctttc

SEQ ID NO: 6337 - RNA, 22 nt, synthetic construct
  source 1..22: mol_type = other RNA
ccccttaccattccccttcgac

SEQ ID NO: 6338 - RNA, 22 nt, synthetic construct
  source 1..22: mol_type = other RNA
ccccttcccaggcaggtcctgc

SEQ ID NO: 6339 - RNA, 22 nt, synthetic construct
  source 1..22: mol_type = other RNA
ccccttcgaccaccccacttcc

SEQ ID NO: 6340 - RNA, 22 nt, synthetic construct
  source 1..22: mol_type = other RNA
ccccttcgacctactctcttcc

SEQ ID NO: 6341 - RNA, 22 nt, synthetic construct
  source 1..22: mol_type = other RNA
ccccttcttgtaggcctgcatc

SEQ ID NO: 6342 - RNA, 22 nt, synthetic construct
  source 1..22: mol_type = other RNA
ccccttgctctctgctgtgttg

SEQ ID NO: 6343 - RNA, 22 nt, synthetic construct
  source 1..22: mol_type = other RNA
cccgaatccacaggagaacggg

SEQ ID NO: 6344 - RNA, 22 nt, synthetic construct
  source 1..22: mol_type = other RNA
cccgagtgcccttgctgtgccg

SEQ ID NO: 6345 - RNA, 22 nt, synthetic construct
  source 1..22: mol_type = other RNA
cccgcctccccttcttgtaggc

SEQ ID NO: 6346 - RNA, 22 nt, synthetic construct
  source 1..22: mol_type = other RNA
cccggagaggacccagacacgg

SEQ ID NO: 6347 - RNA, 22 nt, synthetic construct
  source 1..22: mol_type = other RNA
cccgtcccagtcccccttacca

SEQ ID NO: 6348 - RNA, 22 nt, synthetic construct
  source 1..22: mol_type = other RNA
cccgtcgttcctggccctgggc

SEQ ID NO: 6349 - RNA, 22 nt, synthetic construct
  source 1..22: mol_type = other RNA
cccgtctccctggctttagcca

SEQ ID NO: 6350 - RNA, 22 nt, synthetic construct
  source 1..22: mol_type = other RNA
cccgtgtctgggtcctctccgg

SEQ ID NO: 6351 - RNA, 22 nt, synthetic construct
  source 1..22: mol_type = other RNA
cccgttctcctgtggattcggg

SEQ ID NO: 6352 - RNA, 22 nt, synthetic construct
  source 1..22: mol_type = other RNA
ccctaccccccttacctctcta

SEQ ID NO: 6353 - RNA, 22 nt, synthetic construct
  source 1..22: mol_type = other RNA
ccctatgctgacaccccgtccc

SEQ ID NO: 6354 - RNA, 22 nt, synthetic construct
  source 1..22: mol_type = other RNA
ccctcacccaaccccatgccgt

SEQ ID NO: 6355 - RNA, 22 nt, synthetic construct
  source 1..22: mol_type = other RNA
ccctccagccggtcctggactt

SEQ ID NO: 6356 - RNA, 22 nt, synthetic construct
  source 1..22: mol_type = other RNA
ccctccctcgacttcccctctt

SEQ ID NO: 6357 - RNA, 22 nt, synthetic construct
  source 1..22: mol_type = other RNA
ccctcctctcgcccccgagtgc

SEQ ID NO: 6358 - RNA, 22 nt, synthetic construct
  source 1..22: mol_type = other RNA
ccctcgacttcccctcttccga

SEQ ID NO: 6359 - RNA, 22 nt, synthetic construct
  source 1..22: mol_type = other RNA
ccctctaacgctgccgtctctc

SEQ ID NO: 6360 - RNA, 22 nt, synthetic construct
  source 1..22: mol_type = other RNA
ccctctcctgaacctgagccag

SEQ ID NO: 6361 - RNA, 22 nt, synthetic construct
  source 1..22: mol_type = other RNA
ccctcttccccttgctctctgc

SEQ ID NO: 6362 - RNA, 22 nt, synthetic construct
  source 1..22: mol_type = other RNA
ccctcttccgatgttgagcccc

SEQ ID NO: 6363 - RNA, 22 nt, synthetic construct
  source 1..22: mol_type = other RNA
ccctgccctctcctgaacctga

SEQ ID NO: 6364 - RNA, 22 nt, synthetic construct
  source 1..22: mol_type = other RNA
ccctgccctgccctctcctgaa

SEQ ID NO: 6365 - RNA, 22 nt, synthetic construct
  source 1..22: mol_type = other RNA
ccctgccgcctccttcaggttc

SEQ ID NO: 6366 - RNA, 22 nt, synthetic construct
  source 1..22: mol_type = other RNA
ccctggccattgtcactttgcg

SEQ ID NO: 6367 - RNA, 22 nt, synthetic construct
  source 1..22: mol_type = other RNA
ccctggctttagccacctctcc

SEQ ID NO: 6368 - RNA, 22 nt, synthetic construct
  source 1..22: mol_type = other RNA
ccctggctttggcagcctgtgc

SEQ ID NO: 6369 - RNA, 22 nt, synthetic construct
  source 1..22: mol_type = other RNA
ccctgggcctgtgccgctttct

SEQ ID NO: 6370 - RNA, 22 nt, synthetic construct
  source 1..22: mol_type = other RNA
ccctgggcttagccactctgtg

SEQ ID NO: 6371 - RNA, 22 nt, synthetic construct
  source 1..22: mol_type = other RNA
ccctgggctttgccaccctatg

SEQ ID NO: 6372 - RNA, 22 nt, synthetic construct
  source 1..22: mol_type = other RNA
cccttaccattccccttcgacc

SEQ ID NO: 6373 - RNA, 22 nt, synthetic construct
  source 1..22: mol_type = other RNA
cccttcccaggcaggtcctgct

SEQ ID NO: 6374 - RNA, 22 nt, synthetic construct
  source 1..22: mol_type = other RNA
cccttcgaccaccccacttccg

SEQ ID NO: 6375 - RNA, 22 nt, synthetic construct
  source 1..22: mol_type = other RNA
cccttcgacctactctcttccg

SEQ ID NO: 6376 - RNA, 22 nt, synthetic construct
  source 1..22: mol_type = other RNA
cccttcttgtaggcctgcatca

SEQ ID NO: 6377 - RNA, 22 nt, synthetic construct
  source 1..22: mol_type = other RNA
cccttgcgtcccgcctcccctt

SEQ ID NO: 6378 - RNA, 22 nt, synthetic construct
  source 1..22: mol_type = other RNA
cccttgctctctgctgtgttgc

SEQ ID NO: 6379 - RNA, 22 nt, synthetic construct
  source 1..22: mol_type = other RNA
cccttgctgtgccgccggaact

SEQ ID NO: 6380 - RNA, 22 nt, synthetic construct
  source 1..22: mol_type = other RNA
cccttttccttctccttctggg

SEQ ID NO: 6381 - RNA, 22 nt, synthetic construct
  source 1..22: mol_type = other RNA
ccgaatccacaggagaacgggg

SEQ ID NO: 6382 - RNA, 22 nt, synthetic construct
  source 1..22: mol_type = other RNA
ccgaattggagccgcttcaact

SEQ ID NO: 6383 - RNA, 22 nt, synthetic construct
  source 1..22: mol_type = other RNA
ccgacggatgtctcccttgcgt

SEQ ID NO: 6384 - RNA, 22 nt, synthetic construct
  source 1..22: mol_type = other RNA
ccgagaaggaagtgctccggaa

SEQ ID NO: 6385 - RNA, 22 nt, synthetic construct
  source 1..22: mol_type = other RNA
ccgagtgcccttgctgtgccgc

SEQ ID NO: 6386 - RNA, 22 nt, synthetic construct
  source 1..22: mol_type = other RNA
ccgatgttgagcccctccagcc

SEQ ID NO: 6387 - RNA, 22 nt, synthetic construct
  source 1..22: mol_type = other RNA
ccgcattggagtcgctttaact

SEQ ID NO: 6388 - RNA, 22 nt, synthetic construct
  source 1..22: mol_type = other RNA
ccgccggaactctgccctctaa

SEQ ID NO: 6389 - RNA, 22 nt, synthetic construct
  source 1..22: mol_type = other RNA
ccgcctccccttcttgtaggcc

SEQ ID NO: 6390 - RNA, 22 nt, synthetic construct
  source 1..22: mol_type = other RNA
ccgcctccttcaggttccgtct

SEQ ID NO: 6391 - RNA, 22 nt, synthetic construct
  source 1..22: mol_type = other RNA
ccgcctctggcccactgtttcc

SEQ ID NO: 6392 - RNA, 22 nt, synthetic construct
  source 1..22: mol_type = other RNA
ccgctcagaggacatcacgtgg

SEQ ID NO: 6393 - RNA, 22 nt, synthetic construct
  source 1..22: mol_type = other RNA
ccgcttcaactggccctgggct

SEQ ID NO: 6394 - RNA, 22 nt, synthetic construct
  source 1..22: mol_type = other RNA
ccgctttctgtctgcagcttgt

SEQ ID NO: 6395 - RNA, 22 nt, synthetic construct
  source 1..22: mol_type = other RNA
ccggaaagagcatccttgggca

SEQ ID NO: 6396 - RNA, 22 nt, synthetic construct
  source 1..22: mol_type = other RNA
ccggaactctgccctctaacgc

SEQ ID NO: 6397 - RNA, 22 nt, synthetic construct
  source 1..22: mol_type = other RNA
ccggaccactttgagctctact

SEQ ID NO: 6398 - RNA, 22 nt, synthetic construct
  source 1..22: mol_type = other RNA
ccggactcaggagagagacggc

SEQ ID NO: 6399 - RNA, 22 nt, synthetic construct
  source 1..22: mol_type = other RNA
ccggagaggacccagacacggg

SEQ ID NO: 6400 - RNA, 22 nt, synthetic construct
  source 1..22: mol_type = other RNA
ccggagcacttccttctcggcg

SEQ ID NO: 6401 - RNA, 22 nt, synthetic construct
  source 1..22: mol_type = other RNA
ccggcggcacagcaagggcact

SEQ ID NO: 6402 - RNA, 22 nt, synthetic construct
  source 1..22: mol_type = other RNA
ccggctggaggggctcaacatc

SEQ ID NO: 6403 - RNA, 22 nt, synthetic construct
  source 1..22: mol_type = other RNA
ccgggcatctctcctccctcac

SEQ ID NO: 6404 - RNA, 22 nt, synthetic construct
  source 1..22: mol_type = other RNA
ccggtcctggactttgtctcct

SEQ ID NO: 6405 - RNA, 22 nt, synthetic construct
  source 1..22: mol_type = other RNA
ccgtagaggtgacccaggccac

SEQ ID NO: 6406 - RNA, 22 nt, synthetic construct
  source 1..22: mol_type = other RNA
ccgtcccagtcccccttaccat

SEQ ID NO: 6407 - RNA, 22 nt, synthetic construct
  source 1..22: mol_type = other RNA
ccgtcggagaaggccatcctaa

SEQ ID NO: 6408 - RNA, 22 nt, synthetic construct
  source 1..22: mol_type = other RNA
ccgtcgttcctggccctgggct

SEQ ID NO: 6409 - RNA, 22 nt, synthetic construct
  source 1..22: mol_type = other RNA
ccgtctccctggctttagccac

SEQ ID NO: 6410 - RNA, 22 nt, synthetic construct
  source 1..22: mol_type = other RNA
ccgtctctctcctgagtccgga

SEQ ID NO: 6411 - RNA, 22 nt, synthetic construct
  source 1..22: mol_type = other RNA
ccgtcttcactcgctgggttcc

SEQ ID NO: 6412 - RNA, 22 nt, synthetic construct
  source 1..22: mol_type = other RNA
ccgtcttcctccactccctctt

SEQ ID NO: 6413 - RNA, 22 nt, synthetic construct
  source 1..22: mol_type = other RNA
ccgtgtctgggtcctctccggg

SEQ ID NO: 6414 - RNA, 22 nt, synthetic construct
  source 1..22: mol_type = other RNA
ccgttctcctgtggattcgggt

SEQ ID NO: 6415 - RNA, 22 nt, synthetic construct
  source 1..22: mol_type = other RNA
ccgtttttctggacaaccccaa

SEQ ID NO: 6416 - RNA, 22 nt, synthetic construct
  source 1..22: mol_type = other RNA
cctaagaaacgagagatggcac

SEQ ID NO: 6417 - RNA, 22 nt, synthetic construct
  source 1..22: mol_type = other RNA
cctacaagaaggggaggcggga

SEQ ID NO: 6418 - RNA, 22 nt, synthetic construct
  source 1..22: mol_type = other RNA
cctaccccccttacctctctag

SEQ ID NO: 6419 - RNA, 22 nt, synthetic construct
  source 1..22: mol_type = other RNA
cctactctcttccgcattggag

SEQ ID NO: 6420 - RNA, 22 nt, synthetic construct
  source 1..22: mol_type = other RNA
cctatgctgacaccccgtccca

SEQ ID NO: 6421 - RNA, 22 nt, synthetic construct
  source 1..22: mol_type = other RNA
cctcacccaaccccatgccgtc

SEQ ID NO: 6422 - RNA, 22 nt, synthetic construct
  source 1..22: mol_type = other RNA
cctccactccctcttccccttg

SEQ ID NO: 6423 - RNA, 22 nt, synthetic construct
  source 1..22: mol_type = other RNA
cctccagccggtcctggacttt

SEQ ID NO: 6424 - RNA, 22 nt, synthetic construct
  source 1..22: mol_type = other RNA
cctccccgtgtctgggtcctct

SEQ ID NO: 6425 - RNA, 22 nt, synthetic construct
  source 1..22: mol_type = other RNA
cctccccttcttgtaggcctgc

SEQ ID NO: 6426 - RNA, 22 nt, synthetic construct
  source 1..22: mol_type = other RNA
cctccctcacccaaccccatgc

SEQ ID NO: 6427 - RNA, 22 nt, synthetic construct
  source 1..22: mol_type = other RNA
cctccctcgacttcccctcttc

SEQ ID NO: 6428 - RNA, 22 nt, synthetic construct
  source 1..22: mol_type = other RNA
cctcctctcgcccccgagtgcc

SEQ ID NO: 6429 - RNA, 22 nt, synthetic construct
  source 1..22: mol_type = other RNA
cctccttaccatccctccctcg

SEQ ID NO: 6430 - RNA, 22 nt, synthetic construct
  source 1..22: mol_type = other RNA
cctccttaccattccccttcga

SEQ ID NO: 6431 - RNA, 22 nt, synthetic construct
  source 1..22: mol_type = other RNA
cctccttcaggttccgtcttcc

SEQ ID NO: 6432 - RNA, 22 nt, synthetic construct
  source 1..22: mol_type = other RNA
cctcgacttcccctcttccgat

SEQ ID NO: 6433 - RNA, 22 nt, synthetic construct
  source 1..22: mol_type = other RNA
cctctaacgctgccgtctctct

SEQ ID NO: 6434 - RNA, 22 nt, synthetic construct
  source 1..22: mol_type = other RNA
cctctacggctggcccagatcc

SEQ ID NO: 6435 - RNA, 22 nt, synthetic construct
  source 1..22: mol_type = other RNA
cctctcactcctttcatttggg

SEQ ID NO: 6436 - RNA, 22 nt, synthetic construct
  source 1..22: mol_type = other RNA
cctctccatcctcttgctttct

SEQ ID NO: 6437 - RNA, 22 nt, synthetic construct
  source 1..22: mol_type = other RNA
cctctccgggcatctctcctcc

SEQ ID NO: 6438 - RNA, 22 nt, synthetic construct
  source 1..22: mol_type = other RNA
cctctcctgaacctgagccagc

SEQ ID NO: 6439 - RNA, 22 nt, synthetic construct
  source 1..22: mol_type = other RNA
cctctcgcccccgagtgccctt

SEQ ID NO: 6440 - RNA, 22 nt, synthetic construct
  source 1..22: mol_type = other RNA
cctctgagcggatcctccccgt

SEQ ID NO: 6441 - RNA, 22 nt, synthetic construct
  source 1..22: mol_type = other RNA
cctctggcccactgtttcccct

SEQ ID NO: 6442 - RNA, 22 nt, synthetic construct
  source 1..22: mol_type = other RNA
cctcttccccttgctctctgct

SEQ ID NO: 6443 - RNA, 22 nt, synthetic construct
  source 1..22: mol_type = other RNA
cctcttccgatgttgagcccct

SEQ ID NO: 6444 - RNA, 22 nt, synthetic construct
  source 1..22: mol_type = other RNA
cctcttgctttctttgcctgga

SEQ ID NO: 6445 - RNA, 22 nt, synthetic construct
  source 1..22: mol_type = other RNA
cctgaacctgagccagctccca

SEQ ID NO: 6446 - RNA, 22 nt, synthetic construct
  source 1..22: mol_type = other RNA
cctgaaggaggcggcagggaag

SEQ ID NO: 6447 - RNA, 22 nt, synthetic construct
  source 1..22: mol_type = other RNA
cctgagccagctcccatagctc

SEQ ID NO: 6448 - RNA, 22 nt, synthetic construct
  source 1..22: mol_type = other RNA
cctgagtccggaccactttgag

SEQ ID NO: 6449 - RNA, 22 nt, synthetic construct
  source 1..22: mol_type = other RNA
cctgcatcatcaccgtttttct

SEQ ID NO: 6450 - RNA, 22 nt, synthetic construct
  source 1..22: mol_type = other RNA
cctgcattctctcccctgggcc

SEQ ID NO: 6451 - RNA, 22 nt, synthetic construct
  source 1..22: mol_type = other RNA
cctgccctctcctgaacctgag

SEQ ID NO: 6452 - RNA, 22 nt, synthetic construct
  source 1..22: mol_type = other RNA
cctgccctgccctctcctgaac

SEQ ID NO: 6453 - RNA, 22 nt, synthetic construct
  source 1..22: mol_type = other RNA
cctgccgcctccttcaggttcc

SEQ ID NO: 6454 - RNA, 22 nt, synthetic construct
  source 1..22: mol_type = other RNA
cctgcctgggaaggggaaacag

SEQ ID NO: 6455 - RNA, 22 nt, synthetic construct
  source 1..22: mol_type = other RNA
cctgctttctctgacctgcatt

SEQ ID NO: 6456 - RNA, 22 nt, synthetic construct
  source 1..22: mol_type = other RNA
cctggacaccccgttctcctgt

SEQ ID NO: 6457 - RNA, 22 nt, synthetic construct
  source 1..22: mol_type = other RNA
cctggactttgtctccttccct

SEQ ID NO: 6458 - RNA, 22 nt, synthetic construct
  source 1..22: mol_type = other RNA
cctggccattgtcactttgcgc

SEQ ID NO: 6459 - RNA, 22 nt, synthetic construct
  source 1..22: mol_type = other RNA
cctggccctggccattgtcact

SEQ ID NO: 6460 - RNA, 22 nt, synthetic construct
  source 1..22: mol_type = other RNA
cctggccctgggctttgccacc

SEQ ID NO: 6461 - RNA, 22 nt, synthetic construct
  source 1..22: mol_type = other RNA
cctggctttagccacctctcca

SEQ ID NO: 6462 - RNA, 22 nt, synthetic construct
  source 1..22: mol_type = other RNA
cctggctttggcagcctgtgct

SEQ ID NO: 6463 - RNA, 22 nt, synthetic construct
  source 1..22: mol_type = other RNA
cctgggaaggggaaacagtggg

SEQ ID NO: 6464 - RNA, 22 nt, synthetic construct
  source 1..22: mol_type = other RNA
cctgggcctgtgccgctttctg

SEQ ID NO: 6465 - RNA, 22 nt, synthetic construct
  source 1..22: mol_type = other RNA
cctgggcttagccactctgtgc

SEQ ID NO: 6466 - RNA, 22 nt, synthetic construct
  source 1..22: mol_type = other RNA
cctgggctttgccaccctatgc

SEQ ID NO: 6467 - RNA, 22 nt, synthetic construct
  source 1..22: mol_type = other RNA
cctggggcagagtggtcagcac

SEQ ID NO: 6468 - RNA, 22 nt, synthetic construct
  source 1..22: mol_type = other RNA
cctgggtcacctctacggctgg

SEQ ID NO: 6469 - RNA, 22 nt, synthetic construct
  source 1..22: mol_type = other RNA
cctgtgccatctctcgtttctt

SEQ ID NO: 6470 - RNA, 22 nt, synthetic construct
  source 1..22: mol_type = other RNA
cctgtgccgctttctgtctgca

SEQ ID NO: 6471 - RNA, 22 nt, synthetic construct
  source 1..22: mol_type = other RNA
cctgtgctgacccatgcagtcc

SEQ ID NO: 6472 - RNA, 22 nt, synthetic construct
  source 1..22: mol_type = other RNA
cctgtggattcgggtcacctct

SEQ ID NO: 6473 - RNA, 22 nt, synthetic construct
  source 1..22: mol_type = other RNA
ccttaccatccctccctcgact

SEQ ID NO: 6474 - RNA, 22 nt, synthetic construct
  source 1..22: mol_type = other RNA
ccttaccattccccttcgacca

SEQ ID NO: 6475 - RNA, 22 nt, synthetic construct
  source 1..22: mol_type = other RNA
ccttaccattccccttcgacct

SEQ ID NO: 6476 - RNA, 22 nt, synthetic construct
  source 1..22: mol_type = other RNA
ccttcaggttccgtcttcctcc

SEQ ID NO: 6477 - RNA, 22 nt, synthetic construct
  source 1..22: mol_type = other RNA
ccttcccaggcaggtcctgctt

SEQ ID NO: 6478 - RNA, 22 nt, synthetic construct
  source 1..22: mol_type = other RNA
ccttccctgccctgccctctcc

SEQ ID NO: 6479 - RNA, 22 nt, synthetic construct
  source 1..22: mol_type = other RNA
ccttccctgccgcctccttcag

SEQ ID NO: 6480 - RNA, 22 nt, synthetic construct
  source 1..22: mol_type = other RNA
ccttcgaccaccccacttccga

SEQ ID NO: 6481 - RNA, 22 nt, synthetic construct
  source 1..22: mol_type = other RNA
ccttcgacctactctcttccgc

SEQ ID NO: 6482 - RNA, 22 nt, synthetic construct
  source 1..22: mol_type = other RNA
ccttctccgacggatgtctccc

SEQ ID NO: 6483 - RNA, 22 nt, synthetic construct
  source 1..22: mol_type = other RNA
ccttctccttctggggcctgtg

SEQ ID NO: 6484 - RNA, 22 nt, synthetic construct
  source 1..22: mol_type = other RNA
ccttctcggcgctgcaccacgt

SEQ ID NO: 6485 - RNA, 22 nt, synthetic construct
  source 1..22: mol_type = other RNA
ccttctggggcctgtgccatct

SEQ ID NO: 6486 - RNA, 22 nt, synthetic construct
  source 1..22: mol_type = other RNA
ccttcttgtaggcctgcatcat

SEQ ID NO: 6487 - RNA, 22 nt, synthetic construct
  source 1..22: mol_type = other RNA
ccttgcgtcccgcctccccttc

SEQ ID NO: 6488 - RNA, 22 nt, synthetic construct
  source 1..22: mol_type = other RNA
ccttgctctctgctgtgttgct

SEQ ID NO: 6489 - RNA, 22 nt, synthetic construct
  source 1..22: mol_type = other RNA
ccttgctgtgccgccggaactc

SEQ ID NO: 6490 - RNA, 22 nt, synthetic construct
  source 1..22: mol_type = other RNA
ccttgggcagcaacacagcaga

SEQ ID NO: 6491 - RNA, 22 nt, synthetic construct
  source 1..22: mol_type = other RNA
cctttcatttgggcagctcccc

SEQ ID NO: 6492 - RNA, 22 nt, synthetic construct
  source 1..22: mol_type = other RNA
ccttttccttctccttctgggg

SEQ ID NO: 6493 - RNA, 22 nt, synthetic construct
  source 1..22: mol_type = other RNA
cgaaggggaatggtaaggaggc

SEQ ID NO: 6494 - RNA, 22 nt, synthetic construct
  source 1..22: mol_type = other RNA
cgaaggggaatggtaaggggga

SEQ ID NO: 6495 - RNA, 22 nt, synthetic construct
  source 1..22: mol_type = other RNA
cgaatccacaggagaacggggt

SEQ ID NO: 6496 - RNA, 22 nt, synthetic construct
  source 1..22: mol_type = other RNA
cgaattggagccgcttcaactg

SEQ ID NO: 6497 - RNA, 22 nt, synthetic construct
  source 1..22: mol_type = other RNA
cgaccaccccacttccgaattg

SEQ ID NO: 6498 - RNA, 22 nt, synthetic construct
  source 1..22: mol_type = other RNA
cgacctactctcttccgcattg

SEQ ID NO: 6499 - RNA, 22 nt, synthetic construct
  source 1..22: mol_type = other RNA
cgacggatgtctcccttgcgtc

SEQ ID NO: 6500 - RNA, 22 nt, synthetic construct
  source 1..22: mol_type = other RNA
cgactccaatgcggaagagagt

SEQ ID NO: 6501 - RNA, 22 nt, synthetic construct
  source 1..22: mol_type = other RNA
cgacttcccctcttccgatgtt

SEQ ID NO: 6502 - RNA, 22 nt, synthetic construct
  source 1..22: mol_type = other RNA
cgagaaggaagtgctccggaaa

SEQ ID NO: 6503 - RNA, 22 nt, synthetic construct
  source 1..22: mol_type = other RNA
cgagagatggcacaggccccag

SEQ ID NO: 6504 - RNA, 22 nt, synthetic construct
  source 1..22: mol_type = other RNA
cgagaggagggcagcgcaaagt

SEQ ID NO: 6505 - RNA, 22 nt, synthetic construct
  source 1..22: mol_type = other RNA
cgagggagggatggtaaggagg

SEQ ID NO: 6506 - RNA, 22 nt, synthetic construct
  source 1..22: mol_type = other RNA
cgagtgaagacggcatggggtt

SEQ ID NO: 6507 - RNA, 22 nt, synthetic construct
  source 1..22: mol_type = other RNA
cgagtgcccttgctgtgccgcc

SEQ ID NO: 6508 - RNA, 22 nt, synthetic construct
  source 1..22: mol_type = other RNA
cgatgttgagcccctccagccg

SEQ ID NO: 6509 - RNA, 22 nt, synthetic construct
  source 1..22: mol_type = other RNA
cgcaaagtgacaatggccaggg

SEQ ID NO: 6510 - RNA, 22 nt, synthetic construct
  source 1..22: mol_type = other RNA
cgcaagggagacatccgtcgga

SEQ ID NO: 6511 - RNA, 22 nt, synthetic construct
  source 1..22: mol_type = other RNA
cgcagaagccagtagagctcaa

SEQ ID NO: 6512 - RNA, 22 nt, synthetic construct
  source 1..22: mol_type = other RNA
cgcattggagtcgctttaactg

SEQ ID NO: 6513 - RNA, 22 nt, synthetic construct
  source 1..22: mol_type = other RNA
cgcccccgagtgcccttgctgt

SEQ ID NO: 6514 - RNA, 22 nt, synthetic construct
  source 1..22: mol_type = other RNA
cgccccgtcgttcctggccctg

SEQ ID NO: 6515 - RNA, 22 nt, synthetic construct
  source 1..22: mol_type = other RNA
cgccgagaaggaagtgctccgg

SEQ ID NO: 6516 - RNA, 22 nt, synthetic construct
  source 1..22: mol_type = other RNA
cgccgcctctggcccactgttt

SEQ ID NO: 6517 - RNA, 22 nt, synthetic construct
  source 1..22: mol_type = other RNA
cgccggaactctgccctctaac

SEQ ID NO: 6518 - RNA, 22 nt, synthetic construct
  source 1..22: mol_type = other RNA
cgcctccccttcttgtaggcct

SEQ ID NO: 6519 - RNA, 22 nt, synthetic construct
  source 1..22: mol_type = other RNA
cgcctccttcaggttccgtctt

SEQ ID NO: 6520 - RNA, 22 nt, synthetic construct
  source 1..22: mol_type = other RNA
cgcctctggcccactgtttccc

SEQ ID NO: 6521 - RNA, 22 nt, synthetic construct
  source 1..22: mol_type = other RNA
cgctcagaggacatcacgtggt

SEQ ID NO: 6522 - RNA, 22 nt, synthetic construct
  source 1..22: mol_type = other RNA
cgctgcaccacgtgatgtcctc

SEQ ID NO: 6523 - RNA, 22 nt, synthetic construct
  source 1..22: mol_type = other RNA
cgctgccctcctctcgcccccg

SEQ ID NO: 6524 - RNA, 22 nt, synthetic construct
  source 1..22: mol_type = other RNA
cgctgccgtctctctcctgagt

SEQ ID NO: 6525 - RNA, 22 nt, synthetic construct
  source 1..22: mol_type = other RNA
cgctgggttcccttttccttct

SEQ ID NO: 6526 - RNA, 22 nt, synthetic construct
  source 1..22: mol_type = other RNA
cgcttcaactggccctgggctt

SEQ ID NO: 6527 - RNA, 22 nt, synthetic construct
  source 1..22: mol_type = other RNA
cgctttaactggccctggcttt

SEQ ID NO: 6528 - RNA, 22 nt, synthetic construct
  source 1..22: mol_type = other RNA
cgctttctgtctgcagcttgtg

SEQ ID NO: 6529 - RNA, 22 nt, synthetic construct
  source 1..22: mol_type = other RNA
cggaaagagcatccttgggcag

SEQ ID NO: 6530 - RNA, 22 nt, synthetic construct
  source 1..22: mol_type = other RNA
cggaacctgaaggaggcggcag

SEQ ID NO: 6531 - RNA, 22 nt, synthetic construct
  source 1..22: mol_type = other RNA
cggaactctgccctctaacgct

SEQ ID NO: 6532 - RNA, 22 nt, synthetic construct
  source 1..22: mol_type = other RNA
cggaagagagtaggtcgaaggg

SEQ ID NO: 6533 - RNA, 22 nt, synthetic construct
  source 1..22: mol_type = other RNA
cggaagaggggaagtcgaggga

SEQ ID NO: 6534 - RNA, 22 nt, synthetic construct
  source 1..22: mol_type = other RNA
cggaagtggggtggtcgaaggg

SEQ ID NO: 6535 - RNA, 22 nt, synthetic construct
  source 1..22: mol_type = other RNA
cggaccactttgagctctactg

SEQ ID NO: 6536 - RNA, 22 nt, synthetic construct
  source 1..22: mol_type = other RNA
cggactcaggagagagacggca

SEQ ID NO: 6537 - RNA, 22 nt, synthetic construct
  source 1..22: mol_type = other RNA
cggagaaggccatcctaagaaa

SEQ ID NO: 6538 - RNA, 22 nt, synthetic construct
  source 1..22: mol_type = other RNA
cggagaggacccagacacgggg

SEQ ID NO: 6539 - RNA, 22 nt, synthetic construct
  source 1..22: mol_type = other RNA
cggagcacttccttctcggcgc

SEQ ID NO: 6540 - RNA, 22 nt, synthetic construct
  source 1..22: mol_type = other RNA
cggatcctccccgtgtctgggt

SEQ ID NO: 6541 - RNA, 22 nt, synthetic construct
  source 1..22: mol_type = other RNA
cggatgtctcccttgcgtcccg

SEQ ID NO: 6542 - RNA, 22 nt, synthetic construct
  source 1..22: mol_type = other RNA
cggcacagcaagggcactcggg

SEQ ID NO: 6543 - RNA, 22 nt, synthetic construct
  source 1..22: mol_type = other RNA
cggcacaggcccaggggagaga

SEQ ID NO: 6544 - RNA, 22 nt, synthetic construct
  source 1..22: mol_type = other RNA
cggcagcgttagagggcagagt

SEQ ID NO: 6545 - RNA, 22 nt, synthetic construct
  source 1..22: mol_type = other RNA
cggcagggaaggatctgggcca

SEQ ID NO: 6546 - RNA, 22 nt, synthetic construct
  source 1..22: mol_type = other RNA
cggcatggggttgggtgaggga

SEQ ID NO: 6547 - RNA, 22 nt, synthetic construct
  source 1..22: mol_type = other RNA
cggcgcagaagccagtagagct

SEQ ID NO: 6548 - RNA, 22 nt, synthetic construct
  source 1..22: mol_type = other RNA
cggcgctgcaccacgtgatgtc

SEQ ID NO: 6549 - RNA, 22 nt, synthetic construct
  source 1..22: mol_type = other RNA
cggcggcacagcaagggcactc

SEQ ID NO: 6550 - RNA, 22 nt, synthetic construct
  source 1..22: mol_type = other RNA
cggctccaattcggaagtgggg

SEQ ID NO: 6551 - RNA, 22 nt, synthetic construct
  source 1..22: mol_type = other RNA
cggctggaggggctcaacatcg

SEQ ID NO: 6552 - RNA, 22 nt, synthetic construct
  source 1..22: mol_type = other RNA
cggctggcccagatccttccct

SEQ ID NO: 6553 - RNA, 22 nt, synthetic construct
  source 1..22: mol_type = other RNA
cgggacgcaagggagacatccg

SEQ ID NO: 6554 - RNA, 22 nt, synthetic construct
  source 1..22: mol_type = other RNA
cgggcatctctcctccctcacc

SEQ ID NO: 6555 - RNA, 22 nt, synthetic construct
  source 1..22: mol_type = other RNA
cggggaggatccgctcagagga

SEQ ID NO: 6556 - RNA, 22 nt, synthetic construct
  source 1..22: mol_type = other RNA
cgggggcgagaggagggcagcg

SEQ ID NO: 6557 - RNA, 22 nt, synthetic construct
  source 1..22: mol_type = other RNA
cggggtactttggggttgtcca

SEQ ID NO: 6558 - RNA, 22 nt, synthetic construct
  source 1..22: mol_type = other RNA
cggggtgtcagcatagggtggc

SEQ ID NO: 6559 - RNA, 22 nt, synthetic construct
  source 1..22: mol_type = other RNA
cggggtgtccaggcaaagaaag

SEQ ID NO: 6560 - RNA, 22 nt, synthetic construct
  source 1..22: mol_type = other RNA
cgggtcacctctcactcctttc

SEQ ID NO: 6561 - RNA, 22 nt, synthetic construct
  source 1..22: mol_type = other RNA
cggtcctggactttgtctcctt

SEQ ID NO: 6562 - RNA, 22 nt, synthetic construct
  source 1..22: mol_type = other RNA
cggtgatgatgcaggcctacaa

SEQ ID NO: 6563 - RNA, 22 nt, synthetic construct
  source 1..22: mol_type = other RNA
cgtagaggtgacccaggccaca

SEQ ID NO: 6564 - RNA, 22 nt, synthetic construct
  source 1..22: mol_type = other RNA
cgtcccagtcccccttaccatt

SEQ ID NO: 6565 - RNA, 22 nt, synthetic construct
  source 1..22: mol_type = other RNA
cgtcccgcctccccttcttgta

SEQ ID NO: 6566 - RNA, 22 nt, synthetic construct
  source 1..22: mol_type = other RNA
cgtcggagaaggccatcctaag

SEQ ID NO: 6567 - RNA, 22 nt, synthetic construct
  source 1..22: mol_type = other RNA
cgtcgttcctggccctgggctt

SEQ ID NO: 6568 - RNA, 22 nt, synthetic construct
  source 1..22: mol_type = other RNA
cgtctccctggctttagccacc

SEQ ID NO: 6569 - RNA, 22 nt, synthetic construct
  source 1..22: mol_type = other RNA
cgtctctctcctgagtccggac

SEQ ID NO: 6570 - RNA, 22 nt, synthetic construct
  source 1..22: mol_type = other RNA
cgtcttcactcgctgggttccc

SEQ ID NO: 6571 - RNA, 22 nt, synthetic construct
  source 1..22: mol_type = other RNA
cgtcttcctccactccctcttc

SEQ ID NO: 6572 - RNA, 22 nt, synthetic construct
  source 1..22: mol_type = other RNA
cgtgatgtcctctgagcggatc

SEQ ID NO: 6573 - RNA, 22 nt, synthetic construct
  source 1..22: mol_type = other RNA
cgtggtgcagcgccgagaagga

SEQ ID NO: 6574 - RNA, 22 nt, synthetic construct
  source 1..22: mol_type = other RNA
cgtgtctgggtcctctccgggc

SEQ ID NO: 6575 - RNA, 22 nt, synthetic construct
  source 1..22: mol_type = other RNA
cgttagagggcagagttccggc

SEQ ID NO: 6576 - RNA, 22 nt, synthetic construct
  source 1..22: mol_type = other RNA
cgttcctggccctgggctttgc

SEQ ID NO: 6577 - RNA, 22 nt, synthetic construct
  source 1..22: mol_type = other RNA
cgttctcctgtggattcgggtc

SEQ ID NO: 6578 - RNA, 22 nt, synthetic construct
  source 1..22: mol_type = other RNA
cgtttcttaggatggccttctc

SEQ ID NO: 6579 - RNA, 22 nt, synthetic construct
  source 1..22: mol_type = other RNA
cgtttttctggacaaccccaaa

SEQ ID NO: 6580 - RNA, 22 nt, synthetic construct
  source 1..22: mol_type = other RNA
ctaaagccagggagacggggta

SEQ ID NO: 6581 - RNA, 22 nt, synthetic construct
  source 1..22: mol_type = other RNA
ctaacgctgccgtctctctcct

SEQ ID NO: 6582 - RNA, 22 nt, synthetic construct
  source 1..22: mol_type = other RNA
ctaagaaacgagagatggcaca

SEQ ID NO: 6583 - RNA, 22 nt, synthetic construct
  source 1..22: mol_type = other RNA
ctaagcccagggccagttgaag

SEQ ID NO: 6584 - RNA, 22 nt, synthetic construct
  source 1..22: mol_type = other RNA
ctacaagaaggggaggcgggac

SEQ ID NO: 6585 - RNA, 22 nt, synthetic construct
  source 1..22: mol_type = other RNA
ctaccccccttacctctctagt

SEQ ID NO: 6586 - RNA, 22 nt, synthetic construct
  source 1..22: mol_type = other RNA
ctacggctggcccagatccttc

SEQ ID NO: 6587 - RNA, 22 nt, synthetic construct
  source 1..22: mol_type = other RNA
ctactctcttccgcattggagt

SEQ ID NO: 6588 - RNA, 22 nt, synthetic construct
  source 1..22: mol_type = other RNA
ctactggcttctgcgccgcctc

SEQ ID NO: 6589 - RNA, 22 nt, synthetic construct
  source 1..22: mol_type = other RNA
ctagagaggtaaggggggtagg

SEQ ID NO: 6590 - RNA, 22 nt, synthetic construct
  source 1..22: mol_type = other RNA
ctagcacagactagagaggtaa

SEQ ID NO: 6591 - RNA, 22 nt, synthetic construct
  source 1..22: mol_type = other RNA
ctatctgcctggccctggccat

SEQ ID NO: 6592 - RNA, 22 nt, synthetic construct
  source 1..22: mol_type = other RNA
ctatgctgacaccccgtcccag

SEQ ID NO: 6593 - RNA, 22 nt, synthetic construct
  source 1..22: mol_type = other RNA
ctatgggagctggctcaggttc

SEQ ID NO: 6594 - RNA, 22 nt, synthetic construct
  source 1..22: mol_type = other RNA
ctcaaagtggtccggactcagg

SEQ ID NO: 6595 - RNA, 22 nt, synthetic construct
  source 1..22: mol_type = other RNA
ctcaacatcggaagaggggaag

SEQ ID NO: 6596 - RNA, 22 nt, synthetic construct
  source 1..22: mol_type = other RNA
ctcacccaaccccatgccgtct

SEQ ID NO: 6597 - RNA, 22 nt, synthetic construct
  source 1..22: mol_type = other RNA
ctcactcctttcatttgggcag

SEQ ID NO: 6598 - RNA, 22 nt, synthetic construct
  source 1..22: mol_type = other RNA
ctcagaggacatcacgtggtgc

SEQ ID NO: 6599 - RNA, 22 nt, synthetic construct
  source 1..22: mol_type = other RNA
ctcaggagagagacggcagcgt

SEQ ID NO: 6600 - RNA, 22 nt, synthetic construct
  source 1..22: mol_type = other RNA
ctcaggttcaggagagggcagg

SEQ ID NO: 6601 - RNA, 22 nt, synthetic construct
  source 1..22: mol_type = other RNA
ctcagtctggtctatctgcctg

SEQ ID NO: 6602 - RNA, 22 nt, synthetic construct
  source 1..22: mol_type = other RNA
ctccaatgcggaagagagtagg

SEQ ID NO: 6603 - RNA, 22 nt, synthetic construct
  source 1..22: mol_type = other RNA
ctccaattcggaagtggggtgg

SEQ ID NO: 6604 - RNA, 22 nt, synthetic construct
  source 1..22: mol_type = other RNA
ctccactccctcttccccttgc

SEQ ID NO: 6605 - RNA, 22 nt, synthetic construct
  source 1..22: mol_type = other RNA
ctccagccggtcctggactttg

SEQ ID NO: 6606 - RNA, 22 nt, synthetic construct
  source 1..22: mol_type = other RNA
ctccatcctcttgctttctttg

SEQ ID NO: 6607 - RNA, 22 nt, synthetic construct
  source 1..22: mol_type = other RNA
ctcccatagctcagtctggtct

SEQ ID NO: 6608 - RNA, 22 nt, synthetic construct
  source 1..22: mol_type = other RNA
ctccccgtgtctgggtcctctc

SEQ ID NO: 6609 - RNA, 22 nt, synthetic construct
  source 1..22: mol_type = other RNA
ctcccctaccccccttacctct

SEQ ID NO: 6610 - RNA, 22 nt, synthetic construct
  source 1..22: mol_type = other RNA
ctcccctgggcctgtgccgctt

SEQ ID NO: 6611 - RNA, 22 nt, synthetic construct
  source 1..22: mol_type = other RNA
ctccccttcttgtaggcctgca

SEQ ID NO: 6612 - RNA, 22 nt, synthetic construct
  source 1..22: mol_type = other RNA
ctccctcacccaaccccatgcc

SEQ ID NO: 6613 - RNA, 22 nt, synthetic construct
  source 1..22: mol_type = other RNA
ctccctcgacttcccctcttcc

SEQ ID NO: 6614 - RNA, 22 nt, synthetic construct
  source 1..22: mol_type = other RNA
ctccctcttccccttgctctct

SEQ ID NO: 6615 - RNA, 22 nt, synthetic construct
  source 1..22: mol_type = other RNA
ctccctggctttagccacctct

SEQ ID NO: 6616 - RNA, 22 nt, synthetic construct
  source 1..22: mol_type = other RNA
ctcccttgcgtcccgcctcccc

SEQ ID NO: 6617 - RNA, 22 nt, synthetic construct
  source 1..22: mol_type = other RNA
ctccgacggatgtctcccttgc

SEQ ID NO: 6618 - RNA, 22 nt, synthetic construct
  source 1..22: mol_type = other RNA
ctccggaaagagcatccttggg

SEQ ID NO: 6619 - RNA, 22 nt, synthetic construct
  source 1..22: mol_type = other RNA
ctccgggcatctctcctccctc

SEQ ID NO: 6620 - RNA, 22 nt, synthetic construct
  source 1..22: mol_type = other RNA
ctcctccctcacccaaccccat

SEQ ID NO: 6621 - RNA, 22 nt, synthetic construct
  source 1..22: mol_type = other RNA
ctcctctcgcccccgagtgccc

SEQ ID NO: 6622 - RNA, 22 nt, synthetic construct
  source 1..22: mol_type = other RNA
ctcctgaacctgagccagctcc

SEQ ID NO: 6623 - RNA, 22 nt, synthetic construct
  source 1..22: mol_type = other RNA
ctcctgagtccggaccactttg

SEQ ID NO: 6624 - RNA, 22 nt, synthetic construct
  source 1..22: mol_type = other RNA
ctcctgtggattcgggtcacct

SEQ ID NO: 6625 - RNA, 22 nt, synthetic construct
  source 1..22: mol_type = other RNA
ctccttaccatccctccctcga

SEQ ID NO: 6626 - RNA, 22 nt, synthetic construct
  source 1..22: mol_type = other RNA
ctccttaccattccccttcgac

SEQ ID NO: 6627 - RNA, 22 nt, synthetic construct
  source 1..22: mol_type = other RNA
ctccttcaggttccgtcttcct

SEQ ID NO: 6628 - RNA, 22 nt, synthetic construct
  source 1..22: mol_type = other RNA
ctccttccctgccctgccctct

SEQ ID NO: 6629 - RNA, 22 nt, synthetic construct
  source 1..22: mol_type = other RNA
ctccttctggggcctgtgccat

SEQ ID NO: 6630 - RNA, 22 nt, synthetic construct
  source 1..22: mol_type = other RNA
ctcctttcatttgggcagctcc

SEQ ID NO: 6631 - RNA, 22 nt, synthetic construct
  source 1..22: mol_type = other RNA
ctcgacttcccctcttccgatg

SEQ ID NO: 6632 - RNA, 22 nt, synthetic construct
  source 1..22: mol_type = other RNA
ctcgcccccgagtgcccttgct

SEQ ID NO: 6633 - RNA, 22 nt, synthetic construct
  source 1..22: mol_type = other RNA
ctcgctgggttcccttttcctt

SEQ ID NO: 6634 - RNA, 22 nt, synthetic construct
  source 1..22: mol_type = other RNA
ctcggcgctgcaccacgtgatg

SEQ ID NO: 6635 - RNA, 22 nt, synthetic construct
  source 1..22: mol_type = other RNA
ctcgggggcgagaggagggcag

SEQ ID NO: 6636 - RNA, 22 nt, synthetic construct
  source 1..22: mol_type = other RNA
ctcgtttcttaggatggccttc

SEQ ID NO: 6637 - RNA, 22 nt, synthetic construct
  source 1..22: mol_type = other RNA
ctctaacgctgccgtctctctc

SEQ ID NO: 6638 - RNA, 22 nt, synthetic construct
  source 1..22: mol_type = other RNA
ctctacggctggcccagatcct

SEQ ID NO: 6639 - RNA, 22 nt, synthetic construct
  source 1..22: mol_type = other RNA
ctctactggcttctgcgccgcc

SEQ ID NO: 6640 - RNA, 22 nt, synthetic construct
  source 1..22: mol_type = other RNA
ctctcactcctttcatttgggc

SEQ ID NO: 6641 - RNA, 22 nt, synthetic construct
  source 1..22: mol_type = other RNA
ctctccatcctcttgctttctt

SEQ ID NO: 6642 - RNA, 22 nt, synthetic construct
  source 1..22: mol_type = other RNA
ctctcccctgggcctgtgccgc

SEQ ID NO: 6643 - RNA, 22 nt, synthetic construct
  source 1..22: mol_type = other RNA
ctctccgggcatctctcctccc

SEQ ID NO: 6644 - RNA, 22 nt, synthetic construct
  source 1..22: mol_type = other RNA
ctctcctccctcacccaacccc

SEQ ID NO: 6645 - RNA, 22 nt, synthetic construct
  source 1..22: mol_type = other RNA
ctctcctgaacctgagccagct

SEQ ID NO: 6646 - RNA, 22 nt, synthetic construct
  source 1..22: mol_type = other RNA
ctctcctgagtccggaccactt

SEQ ID NO: 6647 - RNA, 22 nt, synthetic construct
  source 1..22: mol_type = other RNA
ctctcgcccccgagtgcccttg

SEQ ID NO: 6648 - RNA, 22 nt, synthetic construct
  source 1..22: mol_type = other RNA
ctctcgtttcttaggatggcct

SEQ ID NO: 6649 - RNA, 22 nt, synthetic construct
  source 1..22: mol_type = other RNA
ctctctcctgagtccggaccac

SEQ ID NO: 6650 - RNA, 22 nt, synthetic construct
  source 1..22: mol_type = other RNA
ctctctgctgtgttgctgccca

SEQ ID NO: 6651 - RNA, 22 nt, synthetic construct
  source 1..22: mol_type = other RNA
ctctcttccgcattggagtcgc

SEQ ID NO: 6652 - RNA, 22 nt, synthetic construct
  source 1..22: mol_type = other RNA
ctctgacctgcattctctcccc

SEQ ID NO: 6653 - RNA, 22 nt, synthetic construct
  source 1..22: mol_type = other RNA
ctctgagcggatcctccccgtg

SEQ ID NO: 6654 - RNA, 22 nt, synthetic construct
  source 1..22: mol_type = other RNA
ctctgccccaggcctccttacc

SEQ ID NO: 6655 - RNA, 22 nt, synthetic construct
  source 1..22: mol_type = other RNA
ctctgccctctaacgctgccgt

SEQ ID NO: 6656 - RNA, 22 nt, synthetic construct
  source 1..22: mol_type = other RNA
ctctgctgtgttgctgcccaag

SEQ ID NO: 6657 - RNA, 22 nt, synthetic construct
  source 1..22: mol_type = other RNA
ctctggcccactgtttcccctt

SEQ ID NO: 6658 - RNA, 22 nt, synthetic construct
  source 1..22: mol_type = other RNA
ctctgtgctgaccactctgccc

SEQ ID NO: 6659 - RNA, 22 nt, synthetic construct
  source 1..22: mol_type = other RNA
ctcttccccttgctctctgctg

SEQ ID NO: 6660 - RNA, 22 nt, synthetic construct
  source 1..22: mol_type = other RNA
ctcttccgatgttgagcccctc

SEQ ID NO: 6661 - RNA, 22 nt, synthetic construct
  source 1..22: mol_type = other RNA
ctcttccgcattggagtcgctt

SEQ ID NO: 6662 - RNA, 22 nt, synthetic construct
  source 1..22: mol_type = other RNA
ctcttgctttctttgcctggac

SEQ ID NO: 6663 - RNA, 22 nt, synthetic construct
  source 1..22: mol_type = other RNA
ctctttccggagcacttccttc

SEQ ID NO: 6664 - RNA, 22 nt, synthetic construct
  source 1..22: mol_type = other RNA
ctgaacctgagccagctcccat

SEQ ID NO: 6665 - RNA, 22 nt, synthetic construct
  source 1..22: mol_type = other RNA
ctgaaggaggcggcagggaagg

SEQ ID NO: 6666 - RNA, 22 nt, synthetic construct
  source 1..22: mol_type = other RNA
ctgacaccccgtcccagtcccc

SEQ ID NO: 6667 - RNA, 22 nt, synthetic construct
  source 1..22: mol_type = other RNA
ctgaccactctgccccaggcct

SEQ ID NO: 6668 - RNA, 22 nt, synthetic construct
  source 1..22: mol_type = other RNA
ctgacccatgcagtcctcctta

SEQ ID NO: 6669 - RNA, 22 nt, synthetic construct
  source 1..22: mol_type = other RNA
ctgacctgcattctctcccctg

SEQ ID NO: 6670 - RNA, 22 nt, synthetic construct
  source 1..22: mol_type = other RNA
ctgagccagctcccatagctca

SEQ ID NO: 6671 - RNA, 22 nt, synthetic construct
  source 1..22: mol_type = other RNA
ctgagcggatcctccccgtgtc

SEQ ID NO: 6672 - RNA, 22 nt, synthetic construct
  source 1..22: mol_type = other RNA
ctgagctatgggagctggctca

SEQ ID NO: 6673 - RNA, 22 nt, synthetic construct
  source 1..22: mol_type = other RNA
ctgagtccggaccactttgagc

SEQ ID NO: 6674 - RNA, 22 nt, synthetic construct
  source 1..22: mol_type = other RNA
ctgcaccacgtgatgtcctctg

SEQ ID NO: 6675 - RNA, 22 nt, synthetic construct
  source 1..22: mol_type = other RNA
ctgcagacagaaagcggcacag

SEQ ID NO: 6676 - RNA, 22 nt, synthetic construct
  source 1..22: mol_type = other RNA
ctgcagcttgtggcctgggtca

SEQ ID NO: 6677 - RNA, 22 nt, synthetic construct
  source 1..22: mol_type = other RNA
ctgcatcatcaccgtttttctg

SEQ ID NO: 6678 - RNA, 22 nt, synthetic construct
  source 1..22: mol_type = other RNA
ctgcatgggtcagcacaggctg

SEQ ID NO: 6679 - RNA, 22 nt, synthetic construct
  source 1..22: mol_type = other RNA
ctgcattctctcccctgggcct

SEQ ID NO: 6680 - RNA, 22 nt, synthetic construct
  source 1..22: mol_type = other RNA
ctgccaaagccagggccagtta

SEQ ID NO: 6681 - RNA, 22 nt, synthetic construct
  source 1..22: mol_type = other RNA
ctgcccaaatgaaaggagtgag

SEQ ID NO: 6682 - RNA, 22 nt, synthetic construct
  source 1..22: mol_type = other RNA
ctgcccaaggatgctctttccg

SEQ ID NO: 6683 - RNA, 22 nt, synthetic construct
  source 1..22: mol_type = other RNA
ctgccccaggcctccttaccat

SEQ ID NO: 6684 - RNA, 22 nt, synthetic construct
  source 1..22: mol_type = other RNA
ctgccctcctctcgcccccgag

SEQ ID NO: 6685 - RNA, 22 nt, synthetic construct
  source 1..22: mol_type = other RNA
ctgccctctaacgctgccgtct

SEQ ID NO: 6686 - RNA, 22 nt, synthetic construct
  source 1..22: mol_type = other RNA
ctgccctctcctgaacctgagc

SEQ ID NO: 6687 - RNA, 22 nt, synthetic construct
  source 1..22: mol_type = other RNA
ctgccctgccctctcctgaacc

SEQ ID NO: 6688 - RNA, 22 nt, synthetic construct
  source 1..22: mol_type = other RNA
ctgccgcctccttcaggttccg

SEQ ID NO: 6689 - RNA, 22 nt, synthetic construct
  source 1..22: mol_type = other RNA
ctgccgtctctctcctgagtcc

SEQ ID NO: 6690 - RNA, 22 nt, synthetic construct
  source 1..22: mol_type = other RNA
ctgcctggccctggccattgtc

SEQ ID NO: 6691 - RNA, 22 nt, synthetic construct
  source 1..22: mol_type = other RNA
ctgcctgggaaggggaaacagt

SEQ ID NO: 6692 - RNA, 22 nt, synthetic construct
  source 1..22: mol_type = other RNA
ctgcgccgcctctggcccactg

SEQ ID NO: 6693 - RNA, 22 nt, synthetic construct
  source 1..22: mol_type = other RNA
ctgctgtgttgctgcccaagga

SEQ ID NO: 6694 - RNA, 22 nt, synthetic construct
  source 1..22: mol_type = other RNA
ctgctttctctgacctgcattc

SEQ ID NO: 6695 - RNA, 22 nt, synthetic construct
  source 1..22: mol_type = other RNA
ctggacaaccccaaagtacccc

SEQ ID NO: 6696 - RNA, 22 nt, synthetic construct
  source 1..22: mol_type = other RNA
ctggacaccccgttctcctgtg

SEQ ID NO: 6697 - RNA, 22 nt, synthetic construct
  source 1..22: mol_type = other RNA
ctggactttgtctccttccctg

SEQ ID NO: 6698 - RNA, 22 nt, synthetic construct
  source 1..22: mol_type = other RNA
ctggaggggctcaacatcggaa

SEQ ID NO: 6699 - RNA, 22 nt, synthetic construct
  source 1..22: mol_type = other RNA
ctggccattgtcactttgcgct

SEQ ID NO: 6700 - RNA, 22 nt, synthetic construct
  source 1..22: mol_type = other RNA
ctggcccactgtttccccttcc

SEQ ID NO: 6701 - RNA, 22 nt, synthetic construct
  source 1..22: mol_type = other RNA
ctggcccagatccttccctgcc

SEQ ID NO: 6702 - RNA, 22 nt, synthetic construct
  source 1..22: mol_type = other RNA
ctggccctggccattgtcactt

SEQ ID NO: 6703 - RNA, 22 nt, synthetic construct
  source 1..22: mol_type = other RNA
ctggccctggctttggcagcct

SEQ ID NO: 6704 - RNA, 22 nt, synthetic construct
  source 1..22: mol_type = other RNA
ctggccctgggcttagccactc

SEQ ID NO: 6705 - RNA, 22 nt, synthetic construct
  source 1..22: mol_type = other RNA
ctggccctgggctttgccaccc

SEQ ID NO: 6706 - RNA, 22 nt, synthetic construct
  source 1..22: mol_type = other RNA
ctggctcaggttcaggagaggg

SEQ ID NO: 6707 - RNA, 22 nt, synthetic construct
  source 1..22: mol_type = other RNA
ctggcttctgcgccgcctctgg

SEQ ID NO: 6708 - RNA, 22 nt, synthetic construct
  source 1..22: mol_type = other RNA
ctggctttagccacctctccat

SEQ ID NO: 6709 - RNA, 22 nt, synthetic construct
  source 1..22: mol_type = other RNA
ctggctttggcagcctgtgctg

SEQ ID NO: 6710 - RNA, 22 nt, synthetic construct
  source 1..22: mol_type = other RNA
ctgggaaggggaaacagtgggc

SEQ ID NO: 6711 - RNA, 22 nt, synthetic construct
  source 1..22: mol_type = other RNA
ctgggacggggtgtcagcatag

SEQ ID NO: 6712 - RNA, 22 nt, synthetic construct
  source 1..22: mol_type = other RNA
ctgggccagccgtagaggtgac

SEQ ID NO: 6713 - RNA, 22 nt, synthetic construct
  source 1..22: mol_type = other RNA
ctgggcctgtgccgctttctgt

SEQ ID NO: 6714 - RNA, 22 nt, synthetic construct
  source 1..22: mol_type = other RNA
ctgggcttagccactctgtgct

SEQ ID NO: 6715 - RNA, 22 nt, synthetic construct
  source 1..22: mol_type = other RNA
ctgggctttgccaccctatgct

SEQ ID NO: 6716 - RNA, 22 nt, synthetic construct
  source 1..22: mol_type = other RNA
ctggggcagagtggtcagcaca

SEQ ID NO: 6717 - RNA, 22 nt, synthetic construct
  source 1..22: mol_type = other RNA
ctggggcctgtgccatctctcg

SEQ ID NO: 6718 - RNA, 22 nt, synthetic construct
  source 1..22: mol_type = other RNA
ctgggtcacctctacggctggc

SEQ ID NO: 6719 - RNA, 22 nt, synthetic construct
  source 1..22: mol_type = other RNA
ctgggtcctctccgggcatctc

SEQ ID NO: 6720 - RNA, 22 nt, synthetic construct
  source 1..22: mol_type = other RNA
ctgggttcccttttccttctcc

SEQ ID NO: 6721 - RNA, 22 nt, synthetic construct
  source 1..22: mol_type = other RNA
ctggtctatctgcctggccctg

SEQ ID NO: 6722 - RNA, 22 nt, synthetic construct
  source 1..22: mol_type = other RNA
ctgtctgcagcttgtggcctgg

SEQ ID NO: 6723 - RNA, 22 nt, synthetic construct
  source 1..22: mol_type = other RNA
ctgtgccatctctcgtttctta

SEQ ID NO: 6724 - RNA, 22 nt, synthetic construct
  source 1..22: mol_type = other RNA
ctgtgccgccggaactctgccc

SEQ ID NO: 6725 - RNA, 22 nt, synthetic construct
  source 1..22: mol_type = other RNA
ctgtgccgctttctgtctgcag

SEQ ID NO: 6726 - RNA, 22 nt, synthetic construct
  source 1..22: mol_type = other RNA
ctgtgctgaccactctgcccca

SEQ ID NO: 6727 - RNA, 22 nt, synthetic construct
  source 1..22: mol_type = other RNA
ctgtgctgacccatgcagtcct

SEQ ID NO: 6728 - RNA, 22 nt, synthetic construct
  source 1..22: mol_type = other RNA
ctgtggattcgggtcacctctc

SEQ ID NO: 6729 - RNA, 22 nt, synthetic construct
  source 1..22: mol_type = other RNA
ctgtgttgctgcccaaggatgc

SEQ ID NO: 6730 - RNA, 22 nt, synthetic construct
  source 1..22: mol_type = other RNA
ctgtttccccttcccaggcagg

SEQ ID NO: 6731 - RNA, 22 nt, synthetic construct
  source 1..22: mol_type = other RNA
cttaccatccctccctcgactt

SEQ ID NO: 6732 - RNA, 22 nt, synthetic construct
  source 1..22: mol_type = other RNA
cttaccattccccttcgaccac

SEQ ID NO: 6733 - RNA, 22 nt, synthetic construct
  source 1..22: mol_type = other RNA
cttaccattccccttcgaccta

SEQ ID NO: 6734 - RNA, 22 nt, synthetic construct
  source 1..22: mol_type = other RNA
cttagccactctgtgctgacca

SEQ ID NO: 6735 - RNA, 22 nt, synthetic construct
  source 1..22: mol_type = other RNA
cttaggatggccttctccgacg

SEQ ID NO: 6736 - RNA, 22 nt, synthetic construct
  source 1..22: mol_type = other RNA
cttcaactggccctgggcttag

SEQ ID NO: 6737 - RNA, 22 nt, synthetic construct
  source 1..22: mol_type = other RNA
cttcactcgctgggttcccttt

SEQ ID NO: 6738 - RNA, 22 nt, synthetic construct
  source 1..22: mol_type = other RNA
cttcaggttccgtcttcctcca

SEQ ID NO: 6739 - RNA, 22 nt, synthetic construct
  source 1..22: mol_type = other RNA
cttcccaggcaggtcctgcttt

SEQ ID NO: 6740 - RNA, 22 nt, synthetic construct
  source 1..22: mol_type = other RNA
cttcccctcttccgatgttgag

SEQ ID NO: 6741 - RNA, 22 nt, synthetic construct
  source 1..22: mol_type = other RNA
cttccccttgctctctgctgtg

SEQ ID NO: 6742 - RNA, 22 nt, synthetic construct
  source 1..22: mol_type = other RNA
cttccctgccctgccctctcct

SEQ ID NO: 6743 - RNA, 22 nt, synthetic construct
  source 1..22: mol_type = other RNA
cttccctgccgcctccttcagg

SEQ ID NO: 6744 - RNA, 22 nt, synthetic construct
  source 1..22: mol_type = other RNA
cttccgaattggagccgcttca

SEQ ID NO: 6745 - RNA, 22 nt, synthetic construct
  source 1..22: mol_type = other RNA
cttccgatgttgagcccctcca

SEQ ID NO: 6746 - RNA, 22 nt, synthetic construct
  source 1..22: mol_type = other RNA
cttccgcattggagtcgcttta

SEQ ID NO: 6747 - RNA, 22 nt, synthetic construct
  source 1..22: mol_type = other RNA
cttcctccactccctcttcccc

SEQ ID NO: 6748 - RNA, 22 nt, synthetic construct
  source 1..22: mol_type = other RNA
cttccttctcggcgctgcacca

SEQ ID NO: 6749 - RNA, 22 nt, synthetic construct
  source 1..22: mol_type = other RNA
cttcgaccaccccacttccgaa

SEQ ID NO: 6750 - RNA, 22 nt, synthetic construct
  source 1..22: mol_type = other RNA
cttcgacctactctcttccgca

SEQ ID NO: 6751 - RNA, 22 nt, synthetic construct
  source 1..22: mol_type = other RNA
cttctccgacggatgtctccct

SEQ ID NO: 6752 - RNA, 22 nt, synthetic construct
  source 1..22: mol_type = other RNA
cttctccttctggggcctgtgc

SEQ ID NO: 6753 - RNA, 22 nt, synthetic construct
  source 1..22: mol_type = other RNA
cttctcggcgctgcaccacgtg

SEQ ID NO: 6754 - RNA, 22 nt, synthetic construct
  source 1..22: mol_type = other RNA
cttctgcgccgcctctggccca

SEQ ID NO: 6755 - RNA, 22 nt, synthetic construct
  source 1..22: mol_type = other RNA
cttctggggcctgtgccatctc

SEQ ID NO: 6756 - RNA, 22 nt, synthetic construct
  source 1..22: mol_type = other RNA
cttcttgtaggcctgcatcatc

SEQ ID NO: 6757 - RNA, 22 nt, synthetic construct
  source 1..22: mol_type = other RNA
cttgcgtcccgcctccccttct

SEQ ID NO: 6758 - RNA, 22 nt, synthetic construct
  source 1..22: mol_type = other RNA
cttgctctctgctgtgttgctg

SEQ ID NO: 6759 - RNA, 22 nt, synthetic construct
  source 1..22: mol_type = other RNA
cttgctgtgccgccggaactct

SEQ ID NO: 6760 - RNA, 22 nt, synthetic construct
  source 1..22: mol_type = other RNA
cttgctttctttgcctggacac

SEQ ID NO: 6761 - RNA, 22 nt, synthetic construct
  source 1..22: mol_type = other RNA
cttgggcagcaacacagcagag

SEQ ID NO: 6762 - RNA, 22 nt, synthetic construct
  source 1..22: mol_type = other RNA
cttgtaggcctgcatcatcacc

SEQ ID NO: 6763 - RNA, 22 nt, synthetic construct
  source 1..22: mol_type = other RNA
cttgtggcctgggtcacctcta

SEQ ID NO: 6764 - RNA, 22 nt, synthetic construct
  source 1..22: mol_type = other RNA
ctttaactggccctggctttgg

SEQ ID NO: 6765 - RNA, 22 nt, synthetic construct
  source 1..22: mol_type = other RNA
ctttagccacctctccatcctc

SEQ ID NO: 6766 - RNA, 22 nt, synthetic construct
  source 1..22: mol_type = other RNA
ctttcatttgggcagctcccct

SEQ ID NO: 6767 - RNA, 22 nt, synthetic construct
  source 1..22: mol_type = other RNA
ctttccggagcacttccttctc

SEQ ID NO: 6768 - RNA, 22 nt, synthetic construct
  source 1..22: mol_type = other RNA
ctttctctgacctgcattctct

SEQ ID NO: 6769 - RNA, 22 nt, synthetic construct
  source 1..22: mol_type = other RNA
ctttctgtctgcagcttgtggc

SEQ ID NO: 6770 - RNA, 22 nt, synthetic construct
  source 1..22: mol_type = other RNA
ctttctttgcctggacaccccg

SEQ ID NO: 6771 - RNA, 22 nt, synthetic construct
  source 1..22: mol_type = other RNA
ctttgagctctactggcttctg

SEQ ID NO: 6772 - RNA, 22 nt, synthetic construct
  source 1..22: mol_type = other RNA
ctttgccaccctatgctgacac

SEQ ID NO: 6773 - RNA, 22 nt, synthetic construct
  source 1..22: mol_type = other RNA
ctttgcctggacaccccgttct

SEQ ID NO: 6774 - RNA, 22 nt, synthetic construct
  source 1..22: mol_type = other RNA
ctttgcgctgccctcctctcgc

SEQ ID NO: 6775 - RNA, 22 nt, synthetic construct
  source 1..22: mol_type = other RNA
ctttggcagcctgtgctgaccc

SEQ ID NO: 6776 - RNA, 22 nt, synthetic construct
  source 1..22: mol_type = other RNA
ctttggggttgtccagaaaaac

SEQ ID NO: 6777 - RNA, 22 nt, synthetic construct
  source 1..22: mol_type = other RNA
ctttgtctccttccctgccctg

SEQ ID NO: 6778 - RNA, 22 nt, synthetic construct
  source 1..22: mol_type = other RNA
cttttccttctccttctggggc

SEQ ID NO: 6779 - RNA, 22 nt, synthetic construct
  source 1..22: mol_type = other RNA
gaaaaacggtgatgatgcaggc

SEQ ID NO: 6780 - RNA, 22 nt, synthetic construct
  source 1..22: mol_type = other RNA
gaaaagggaacccagcgagtga

SEQ ID NO: 6781 - RNA, 22 nt, synthetic construct
  source 1..22: mol_type = other RNA
gaaacagtgggccagaggcggc

SEQ ID NO: 6782 - RNA, 22 nt, synthetic construct
  source 1..22: mol_type = other RNA
gaaacgagagatggcacaggcc

SEQ ID NO: 6783 - RNA, 22 nt, synthetic construct
  source 1..22: mol_type = other RNA
gaaagagcatccttgggcagca

SEQ ID NO: 6784 - RNA, 22 nt, synthetic construct
  source 1..22: mol_type = other RNA
gaaagcaagaggatggagaggt

SEQ ID NO: 6785 - RNA, 22 nt, synthetic construct
  source 1..22: mol_type = other RNA
gaaagcaggacctgcctgggaa

SEQ ID NO: 6786 - RNA, 22 nt, synthetic construct
  source 1..22: mol_type = other RNA
gaaagcggcacaggcccagggg

SEQ ID NO: 6787 - RNA, 22 nt, synthetic construct
  source 1..22: mol_type = other RNA
gaaaggagtgagaggtgacccg

SEQ ID NO: 6788 - RNA, 22 nt, synthetic construct
  source 1..22: mol_type = other RNA
gaacccagcgagtgaagacggc

SEQ ID NO: 6789 - RNA, 22 nt, synthetic construct
  source 1..22: mol_type = other RNA
gaacctgaaggaggcggcaggg

SEQ ID NO: 6790 - RNA, 22 nt, synthetic construct
  source 1..22: mol_type = other RNA
gaacctgagccagctcccatag

SEQ ID NO: 6791 - RNA, 22 nt, synthetic construct
  source 1..22: mol_type = other RNA
gaacggggtgtccaggcaaaga

SEQ ID NO: 6792 - RNA, 22 nt, synthetic construct
  source 1..22: mol_type = other RNA
gaactctgccctctaacgctgc

SEQ ID NO: 6793 - RNA, 22 nt, synthetic construct
  source 1..22: mol_type = other RNA
gaagacggaacctgaaggaggc

SEQ ID NO: 6794 - RNA, 22 nt, synthetic construct
  source 1..22: mol_type = other RNA
gaagacggcatggggttgggtg

SEQ ID NO: 6795 - RNA, 22 nt, synthetic construct
  source 1..22: mol_type = other RNA
gaagagagtaggtcgaagggga

SEQ ID NO: 6796 - RNA, 22 nt, synthetic construct
  source 1..22: mol_type = other RNA
gaagagggagtggaggaagacg

SEQ ID NO: 6797 - RNA, 22 nt, synthetic construct
  source 1..22: mol_type = other RNA
gaagaggggaagtcgagggagg

SEQ ID NO: 6798 - RNA, 22 nt, synthetic construct
  source 1..22: mol_type = other RNA
gaagccagtagagctcaaagtg

SEQ ID NO: 6799 - RNA, 22 nt, synthetic construct
  source 1..22: mol_type = other RNA
gaagcggctccaattcggaagt

SEQ ID NO: 6800 - RNA, 22 nt, synthetic construct
  source 1..22: mol_type = other RNA
gaaggaaaagggaacccagcga

SEQ ID NO: 6801 - RNA, 22 nt, synthetic construct
  source 1..22: mol_type = other RNA
gaaggaagtgctccggaaagag

SEQ ID NO: 6802 - RNA, 22 nt, synthetic construct
  source 1..22: mol_type = other RNA
gaaggagaaggaaaagggaacc

SEQ ID NO: 6803 - RNA, 22 nt, synthetic construct
  source 1..22: mol_type = other RNA
gaaggagacaaagtccaggacc

SEQ ID NO: 6804 - RNA, 22 nt, synthetic construct
  source 1..22: mol_type = other RNA
gaaggaggcggcagggaaggat

SEQ ID NO: 6805 - RNA, 22 nt, synthetic construct
  source 1..22: mol_type = other RNA
gaaggatctgggccagccgtag

SEQ ID NO: 6806 - RNA, 22 nt, synthetic construct
  source 1..22: mol_type = other RNA
gaaggccatcctaagaaacgag

SEQ ID NO: 6807 - RNA, 22 nt, synthetic construct
  source 1..22: mol_type = other RNA
gaaggggaaacagtgggccaga

SEQ ID NO: 6808 - RNA, 22 nt, synthetic construct
  source 1..22: mol_type = other RNA
gaaggggaatggtaaggaggcc

SEQ ID NO: 6809 - RNA, 22 nt, synthetic construct
  source 1..22: mol_type = other RNA
gaaggggaatggtaagggggac

SEQ ID NO: 6810 - RNA, 22 nt, synthetic construct
  source 1..22: mol_type = other RNA
gaaggggaggcgggacgcaagg

SEQ ID NO: 6811 - RNA, 22 nt, synthetic construct
  source 1..22: mol_type = other RNA
gaagtcgagggagggatggtaa

SEQ ID NO: 6812 - RNA, 22 nt, synthetic construct
  source 1..22: mol_type = other RNA
gaagtgctccggaaagagcatc

SEQ ID NO: 6813 - RNA, 22 nt, synthetic construct
  source 1..22: mol_type = other RNA
gaagtggggtggtcgaagggga

SEQ ID NO: 6814 - RNA, 22 nt, synthetic construct
  source 1..22: mol_type = other RNA
gaatccacaggagaacggggtg

SEQ ID NO: 6815 - RNA, 22 nt, synthetic construct
  source 1..22: mol_type = other RNA
gaatgcaggtcagagaaagcag

SEQ ID NO: 6816 - RNA, 22 nt, synthetic construct
  source 1..22: mol_type = other RNA
gaatggtaaggaggcctggggc

SEQ ID NO: 6817 - RNA, 22 nt, synthetic construct
  source 1..22: mol_type = other RNA
gaatggtaagggggactgggac

SEQ ID NO: 6818 - RNA, 22 nt, synthetic construct
  source 1..22: mol_type = other RNA
gaattggagccgcttcaactgg

SEQ ID NO: 6819 - RNA, 22 nt, synthetic construct
  source 1..22: mol_type = other RNA
gacaaagtccaggaccggctgg

SEQ ID NO: 6820 - RNA, 22 nt, synthetic construct
  source 1..22: mol_type = other RNA
gacaaccccaaagtaccccgtc

SEQ ID NO: 6821 - RNA, 22 nt, synthetic construct
  source 1..22: mol_type = other RNA
gacaatggccagggccaggcag

SEQ ID NO: 6822 - RNA, 22 nt, synthetic construct
  source 1..22: mol_type = other RNA
gacaccccgtcccagtccccct

SEQ ID NO: 6823 - RNA, 22 nt, synthetic construct
  source 1..22: mol_type = other RNA
gacaccccgttctcctgtggat

SEQ ID NO: 6824 - RNA, 22 nt, synthetic construct
  source 1..22: mol_type = other RNA
gacacggggaggatccgctcag

SEQ ID NO: 6825 - RNA, 22 nt, synthetic construct
  source 1..22: mol_type = other RNA
gacagaaagcggcacaggccca

SEQ ID NO: 6826 - RNA, 22 nt, synthetic construct
  source 1..22: mol_type = other RNA
gacatcacgtggtgcagcgccg

SEQ ID NO: 6827 - RNA, 22 nt, synthetic construct
  source 1..22: mol_type = other RNA
gacatccgtcggagaaggccat

SEQ ID NO: 6828 - RNA, 22 nt, synthetic construct
  source 1..22: mol_type = other RNA
gaccaccccacttccgaattgg

SEQ ID NO: 6829 - RNA, 22 nt, synthetic construct
  source 1..22: mol_type = other RNA
gaccactctgccccaggcctcc

SEQ ID NO: 6830 - RNA, 22 nt, synthetic construct
  source 1..22: mol_type = other RNA
gaccactttgagctctactggc

SEQ ID NO: 6831 - RNA, 22 nt, synthetic construct
  source 1..22: mol_type = other RNA
gaccagactgagctatgggagc

SEQ ID NO: 6832 - RNA, 22 nt, synthetic construct
  source 1..22: mol_type = other RNA
gacccagacacggggaggatcc

SEQ ID NO: 6833 - RNA, 22 nt, synthetic construct
  source 1..22: mol_type = other RNA
gacccaggccacaagctgcaga

SEQ ID NO: 6834 - RNA, 22 nt, synthetic construct
  source 1..22: mol_type = other RNA
gacccatgcagtcctccttacc

SEQ ID NO: 6835 - RNA, 22 nt, synthetic construct
  source 1..22: mol_type = other RNA
gacccgaatccacaggagaacg

SEQ ID NO: 6836 - RNA, 22 nt, synthetic construct
  source 1..22: mol_type = other RNA
gaccggctggaggggctcaaca

SEQ ID NO: 6837 - RNA, 22 nt, synthetic construct
  source 1..22: mol_type = other RNA
gacctactctcttccgcattgg

SEQ ID NO: 6838 - RNA, 22 nt, synthetic construct
  source 1..22: mol_type = other RNA
gacctgcattctctcccctggg

SEQ ID NO: 6839 - RNA, 22 nt, synthetic construct
  source 1..22: mol_type = other RNA
gacctgcctgggaaggggaaac

SEQ ID NO: 6840 - RNA, 22 nt, synthetic construct
  source 1..22: mol_type = other RNA
gacgcaagggagacatccgtcg

SEQ ID NO: 6841 - RNA, 22 nt, synthetic construct
  source 1..22: mol_type = other RNA
gacggaacctgaaggaggcggc

SEQ ID NO: 6842 - RNA, 22 nt, synthetic construct
  source 1..22: mol_type = other RNA
gacggatgtctcccttgcgtcc

SEQ ID NO: 6843 - RNA, 22 nt, synthetic construct
  source 1..22: mol_type = other RNA
gacggcagcgttagagggcaga

SEQ ID NO: 6844 - RNA, 22 nt, synthetic construct
  source 1..22: mol_type = other RNA
gacggcatggggttgggtgagg

SEQ ID NO: 6845 - RNA, 22 nt, synthetic construct
  source 1..22: mol_type = other RNA
gacggggtactttggggttgtc

SEQ ID NO: 6846 - RNA, 22 nt, synthetic construct
  source 1..22: mol_type = other RNA
gacggggtgtcagcatagggtg

SEQ ID NO: 6847 - RNA, 22 nt, synthetic construct
  source 1..22: mol_type = other RNA
gactagagaggtaaggggggta

SEQ ID NO: 6848 - RNA, 22 nt, synthetic construct
  source 1..22: mol_type = other RNA
gactcaggagagagacggcagc

SEQ ID NO: 6849 - RNA, 22 nt, synthetic construct
  source 1..22: mol_type = other RNA
gactccaatgcggaagagagta

SEQ ID NO: 6850 - RNA, 22 nt, synthetic construct
  source 1..22: mol_type = other RNA
gactgagctatgggagctggct

SEQ ID NO: 6851 - RNA, 22 nt, synthetic construct
  source 1..22: mol_type = other RNA
gactgcatgggtcagcacaggc

SEQ ID NO: 6852 - RNA, 22 nt, synthetic construct
  source 1..22: mol_type = other RNA
gactgggacggggtgtcagcat

SEQ ID NO: 6853 - RNA, 22 nt, synthetic construct
  source 1..22: mol_type = other RNA
gacttcccctcttccgatgttg

SEQ ID NO: 6854 - RNA, 22 nt, synthetic construct
  source 1..22: mol_type = other RNA
gactttgtctccttccctgccc

SEQ ID NO: 6855 - RNA, 22 nt, synthetic construct
  source 1..22: mol_type = other RNA
gagaaagcaggacctgcctggg

SEQ ID NO: 6856 - RNA, 22 nt, synthetic construct
  source 1..22: mol_type = other RNA
gagaacggggtgtccaggcaaa

SEQ ID NO: 6857 - RNA, 22 nt, synthetic construct
  source 1..22: mol_type = other RNA
gagaaggaaaagggaacccagc

SEQ ID NO: 6858 - RNA, 22 nt, synthetic construct
  source 1..22: mol_type = other RNA
gagaaggaagtgctccggaaag

SEQ ID NO: 6859 - RNA, 22 nt, synthetic construct
  source 1..22: mol_type = other RNA
gagaaggccatcctaagaaacg

SEQ ID NO: 6860 - RNA, 22 nt, synthetic construct
  source 1..22: mol_type = other RNA
gagaatgcaggtcagagaaagc

SEQ ID NO: 6861 - RNA, 22 nt, synthetic construct
  source 1..22: mol_type = other RNA
gagacaaagtccaggaccggct

SEQ ID NO: 6862 - RNA, 22 nt, synthetic construct
  source 1..22: mol_type = other RNA
gagacatccgtcggagaaggcc

SEQ ID NO: 6863 - RNA, 22 nt, synthetic construct
  source 1..22: mol_type = other RNA
gagacggcagcgttagagggca

SEQ ID NO: 6864 - RNA, 22 nt, synthetic construct
  source 1..22: mol_type = other RNA
gagacggggtactttggggttg

SEQ ID NO: 6865 - RNA, 22 nt, synthetic construct
  source 1..22: mol_type = other RNA
gagagaatgcaggtcagagaaa

SEQ ID NO: 6866 - RNA, 22 nt, synthetic construct
  source 1..22: mol_type = other RNA
gagagacggcagcgttagaggg

SEQ ID NO: 6867 - RNA, 22 nt, synthetic construct
  source 1..22: mol_type = other RNA
gagagagacggcagcgttagag

SEQ ID NO: 6868 - RNA, 22 nt, synthetic construct
  source 1..22: mol_type = other RNA
gagagatgcccggagaggaccc

SEQ ID NO: 6869 - RNA, 22 nt, synthetic construct
  source 1..22: mol_type = other RNA
gagagatggcacaggccccaga

SEQ ID NO: 6870 - RNA, 22 nt, synthetic construct
  source 1..22: mol_type = other RNA
gagagcaaggggaagagggagt

SEQ ID NO: 6871 - RNA, 22 nt, synthetic construct
  source 1..22: mol_type = other RNA
gagaggacccagacacggggag

SEQ ID NO: 6872 - RNA, 22 nt, synthetic construct
  source 1..22: mol_type = other RNA
gagaggagggcagcgcaaagtg

SEQ ID NO: 6873 - RNA, 22 nt, synthetic construct
  source 1..22: mol_type = other RNA
gagagggcagggcagggaagga

SEQ ID NO: 6874 - RNA, 22 nt, synthetic construct
  source 1..22: mol_type = other RNA
gagaggtaaggggggtagggga

SEQ ID NO: 6875 - RNA, 22 nt, synthetic construct
  source 1..22: mol_type = other RNA
gagaggtgacccgaatccacag

SEQ ID NO: 6876 - RNA, 22 nt, synthetic construct
  source 1..22: mol_type = other RNA
gagaggtggctaaagccaggga

SEQ ID NO: 6877 - RNA, 22 nt, synthetic construct
  source 1..22: mol_type = other RNA
gagagtaggtcgaaggggaatg

SEQ ID NO: 6878 - RNA, 22 nt, synthetic construct
  source 1..22: mol_type = other RNA
gagatgcccggagaggacccag

SEQ ID NO: 6879 - RNA, 22 nt, synthetic construct
  source 1..22: mol_type = other RNA
gagatggcacaggccccagaag

SEQ ID NO: 6880 - RNA, 22 nt, synthetic construct
  source 1..22: mol_type = other RNA
gagcaaggggaagagggagtgg

SEQ ID NO: 6881 - RNA, 22 nt, synthetic construct
  source 1..22: mol_type = other RNA
gagcacttccttctcggcgctg

SEQ ID NO: 6882 - RNA, 22 nt, synthetic construct
  source 1..22: mol_type = other RNA
gagcatccttgggcagcaacac

SEQ ID NO: 6883 - RNA, 22 nt, synthetic construct
  source 1..22: mol_type = other RNA
gagccagctcccatagctcagt

SEQ ID NO: 6884 - RNA, 22 nt, synthetic construct
  source 1..22: mol_type = other RNA
gagcccctccagccggtcctgg

SEQ ID NO: 6885 - RNA, 22 nt, synthetic construct
  source 1..22: mol_type = other RNA
gagccgcttcaactggccctgg

SEQ ID NO: 6886 - RNA, 22 nt, synthetic construct
  source 1..22: mol_type = other RNA
gagcggatcctccccgtgtctg

SEQ ID NO: 6887 - RNA, 22 nt, synthetic construct
  source 1..22: mol_type = other RNA
gagctagcacagactagagagg

SEQ ID NO: 6888 - RNA, 22 nt, synthetic construct
  source 1..22: mol_type = other RNA
gagctatgggagctggctcagg

SEQ ID NO: 6889 - RNA, 22 nt, synthetic construct
  source 1..22: mol_type = other RNA
gagctcaaagtggtccggactc

SEQ ID NO: 6890 - RNA, 22 nt, synthetic construct
  source 1..22: mol_type = other RNA
gagctctactggcttctgcgcc

SEQ ID NO: 6891 - RNA, 22 nt, synthetic construct
  source 1..22: mol_type = other RNA
gagctgcccaaatgaaaggagt

SEQ ID NO: 6892 - RNA, 22 nt, synthetic construct
  source 1..22: mol_type = other RNA
gagctggctcaggttcaggaga

SEQ ID NO: 6893 - RNA, 22 nt, synthetic construct
  source 1..22: mol_type = other RNA
gaggaagacggaacctgaagga

SEQ ID NO: 6894 - RNA, 22 nt, synthetic construct
  source 1..22: mol_type = other RNA
gaggacatcacgtggtgcagcg

SEQ ID NO: 6895 - RNA, 22 nt, synthetic construct
  source 1..22: mol_type = other RNA
gaggacccagacacggggagga

SEQ ID NO: 6896 - RNA, 22 nt, synthetic construct
  source 1..22: mol_type = other RNA
gaggactgcatgggtcagcaca

SEQ ID NO: 6897 - RNA, 22 nt, synthetic construct
  source 1..22: mol_type = other RNA
gaggagagatgcccggagagga

SEQ ID NO: 6898 - RNA, 22 nt, synthetic construct
  source 1..22: mol_type = other RNA
gaggagggcagcgcaaagtgac

SEQ ID NO: 6899 - RNA, 22 nt, synthetic construct
  source 1..22: mol_type = other RNA
gaggatccgctcagaggacatc

SEQ ID NO: 6900 - RNA, 22 nt, synthetic construct
  source 1..22: mol_type = other RNA
gaggatggagaggtggctaaag

SEQ ID NO: 6901 - RNA, 22 nt, synthetic construct
  source 1..22: mol_type = other RNA
gaggcctggggcagagtggtca

SEQ ID NO: 6902 - RNA, 22 nt, synthetic construct
  source 1..22: mol_type = other RNA
gaggcggcagggaaggatctgg

SEQ ID NO: 6903 - RNA, 22 nt, synthetic construct
  source 1..22: mol_type = other RNA
gaggcggcgcagaagccagtag

SEQ ID NO: 6904 - RNA, 22 nt, synthetic construct
  source 1..22: mol_type = other RNA
gaggcgggacgcaagggagaca

SEQ ID NO: 6905 - RNA, 22 nt, synthetic construct
  source 1..22: mol_type = other RNA
gagggaggagagatgcccggag

SEQ ID NO: 6906 - RNA, 22 nt, synthetic construct
  source 1..22: mol_type = other RNA
gagggagggatggtaaggagga

SEQ ID NO: 6907 - RNA, 22 nt, synthetic construct
  source 1..22: mol_type = other RNA
gagggagtggaggaagacggaa

SEQ ID NO: 6908 - RNA, 22 nt, synthetic construct
  source 1..22: mol_type = other RNA
gagggatggtaaggaggactgc

SEQ ID NO: 6909 - RNA, 22 nt, synthetic construct
  source 1..22: mol_type = other RNA
gagggcagagttccggcggcac

SEQ ID NO: 6910 - RNA, 22 nt, synthetic construct
  source 1..22: mol_type = other RNA
gagggcagcgcaaagtgacaat

SEQ ID NO: 6911 - RNA, 22 nt, synthetic construct
  source 1..22: mol_type = other RNA
gagggcagggcagggaaggaga

SEQ ID NO: 6912 - RNA, 22 nt, synthetic construct
  source 1..22: mol_type = other RNA
gaggggaagtcgagggagggat

SEQ ID NO: 6913 - RNA, 22 nt, synthetic construct
  source 1..22: mol_type = other RNA
gaggggctcaacatcggaagag

SEQ ID NO: 6914 - RNA, 22 nt, synthetic construct
  source 1..22: mol_type = other RNA
gaggtaaggggggtaggggagc

SEQ ID NO: 6915 - RNA, 22 nt, synthetic construct
  source 1..22: mol_type = other RNA
gaggtgacccaggccacaagct

SEQ ID NO: 6916 - RNA, 22 nt, synthetic construct
  source 1..22: mol_type = other RNA
gaggtgacccgaatccacagga

SEQ ID NO: 6917 - RNA, 22 nt, synthetic construct
  source 1..22: mol_type = other RNA
gaggtggctaaagccagggaga

SEQ ID NO: 6918 - RNA, 22 nt, synthetic construct
  source 1..22: mol_type = other RNA
gagtaggtcgaaggggaatggt

SEQ ID NO: 6919 - RNA, 22 nt, synthetic construct
  source 1..22: mol_type = other RNA
gagtccggaccactttgagctc

SEQ ID NO: 6920 - RNA, 22 nt, synthetic construct
  source 1..22: mol_type = other RNA
gagtcgctttaactggccctgg

SEQ ID NO: 6921 - RNA, 22 nt, synthetic construct
  source 1..22: mol_type = other RNA
gagtgaagacggcatggggttg

SEQ ID NO: 6922 - RNA, 22 nt, synthetic construct
  source 1..22: mol_type = other RNA
gagtgagaggtgacccgaatcc

SEQ ID NO: 6923 - RNA, 22 nt, synthetic construct
  source 1..22: mol_type = other RNA
gagtgcccttgctgtgccgccg

SEQ ID NO: 6924 - RNA, 22 nt, synthetic construct
  source 1..22: mol_type = other RNA
gagtggaggaagacggaacctg

SEQ ID NO: 6925 - RNA, 22 nt, synthetic construct
  source 1..22: mol_type = other RNA
gagtggctaagcccagggccag

SEQ ID NO: 6926 - RNA, 22 nt, synthetic construct
  source 1..22: mol_type = other RNA
gagtggtcagcacagagtggct

SEQ ID NO: 6927 - RNA, 22 nt, synthetic construct
  source 1..22: mol_type = other RNA
gagttccggcggcacagcaagg

SEQ ID NO: 6928 - RNA, 22 nt, synthetic construct
  source 1..22: mol_type = other RNA
gatagaccagactgagctatgg

SEQ ID NO: 6929 - RNA, 22 nt, synthetic construct
  source 1..22: mol_type = other RNA
gatccgctcagaggacatcacg

SEQ ID NO: 6930 - RNA, 22 nt, synthetic construct
  source 1..22: mol_type = other RNA
gatcctccccgtgtctgggtcc

SEQ ID NO: 6931 - RNA, 22 nt, synthetic construct
  source 1..22: mol_type = other RNA
gatccttccctgccgcctcctt

SEQ ID NO: 6932 - RNA, 22 nt, synthetic construct
  source 1..22: mol_type = other RNA
gatctgggccagccgtagaggt

SEQ ID NO: 6933 - RNA, 22 nt, synthetic construct
  source 1..22: mol_type = other RNA
gatgatgcaggcctacaagaag

SEQ ID NO: 6934 - RNA, 22 nt, synthetic construct
  source 1..22: mol_type = other RNA
gatgcaggcctacaagaagggg

SEQ ID NO: 6935 - RNA, 22 nt, synthetic construct
  source 1..22: mol_type = other RNA
gatgcccggagaggacccagac

SEQ ID NO: 6936 - RNA, 22 nt, synthetic construct
  source 1..22: mol_type = other RNA
gatgctctttccggagcacttc

SEQ ID NO: 6937 - RNA, 22 nt, synthetic construct
  source 1..22: mol_type = other RNA
gatggagaggtggctaaagcca

SEQ ID NO: 6938 - RNA, 22 nt, synthetic construct
  source 1..22: mol_type = other RNA
gatggcacaggccccagaagga

SEQ ID NO: 6939 - RNA, 22 nt, synthetic construct
  source 1..22: mol_type = other RNA
gatggccttctccgacggatgt

SEQ ID NO: 6940 - RNA, 22 nt, synthetic construct
  source 1..22: mol_type = other RNA
gatggtaaggaggactgcatgg

SEQ ID NO: 6941 - RNA, 22 nt, synthetic construct
  source 1..22: mol_type = other RNA
gatgtcctctgagcggatcctc

SEQ ID NO: 6942 - RNA, 22 nt, synthetic construct
  source 1..22: mol_type = other RNA
gatgtctcccttgcgtcccgcc

SEQ ID NO: 6943 - RNA, 22 nt, synthetic construct
  source 1..22: mol_type = other RNA
gatgttgagcccctccagccgg

SEQ ID NO: 6944 - RNA, 22 nt, synthetic construct
  source 1..22: mol_type = other RNA
gattcgggtcacctctcactcc

SEQ ID NO: 6945 - RNA, 22 nt, synthetic construct
  source 1..22: mol_type = other RNA
gcaaagaaagcaagaggatgga

SEQ ID NO: 6946 - RNA, 22 nt, synthetic construct
  source 1..22: mol_type = other RNA
gcaaagcccagggccaggaacg

SEQ ID NO: 6947 - RNA, 22 nt, synthetic construct
  source 1..22: mol_type = other RNA
gcaaagtgacaatggccagggc

SEQ ID NO: 6948 - RNA, 22 nt, synthetic construct
  source 1..22: mol_type = other RNA
gcaacacagcagagagcaaggg

SEQ ID NO: 6949 - RNA, 22 nt, synthetic construct
  source 1..22: mol_type = other RNA
gcaagaggatggagaggtggct

SEQ ID NO: 6950 - RNA, 22 nt, synthetic construct
  source 1..22: mol_type = other RNA
gcaagggagacatccgtcggag

SEQ ID NO: 6951 - RNA, 22 nt, synthetic construct
  source 1..22: mol_type = other RNA
gcaagggcactcgggggcgaga

SEQ ID NO: 6952 - RNA, 22 nt, synthetic construct
  source 1..22: mol_type = other RNA
gcaaggggaagagggagtggag

SEQ ID NO: 6953 - RNA, 22 nt, synthetic construct
  source 1..22: mol_type = other RNA
gcacagactagagaggtaaggg

SEQ ID NO: 6954 - RNA, 22 nt, synthetic construct
  source 1..22: mol_type = other RNA
gcacagagtggctaagcccagg

SEQ ID NO: 6955 - RNA, 22 nt, synthetic construct
  source 1..22: mol_type = other RNA
gcacagcaagggcactcggggg

SEQ ID NO: 6956 - RNA, 22 nt, synthetic construct
  source 1..22: mol_type = other RNA
gcacaggcccaggggagagaat

SEQ ID NO: 6957 - RNA, 22 nt, synthetic construct
  source 1..22: mol_type = other RNA
gcacaggccccagaaggagaag

SEQ ID NO: 6958 - RNA, 22 nt, synthetic construct
  source 1..22: mol_type = other RNA
gcacaggctgccaaagccaggg

SEQ ID NO: 6959 - RNA, 22 nt, synthetic construct
  source 1..22: mol_type = other RNA
gcaccacgtgatgtcctctgag

SEQ ID NO: 6960 - RNA, 22 nt, synthetic construct
  source 1..22: mol_type = other RNA
gcactcgggggcgagaggaggg

SEQ ID NO: 6961 - RNA, 22 nt, synthetic construct
  source 1..22: mol_type = other RNA
gcacttccttctcggcgctgca

SEQ ID NO: 6962 - RNA, 22 nt, synthetic construct
  source 1..22: mol_type = other RNA
gcagaagccagtagagctcaaa

SEQ ID NO: 6963 - RNA, 22 nt, synthetic construct
  source 1..22: mol_type = other RNA
gcagacagaaagcggcacaggc

SEQ ID NO: 6964 - RNA, 22 nt, synthetic construct
  source 1..22: mol_type = other RNA
gcagagagcaaggggaagaggg

SEQ ID NO: 6965 - RNA, 22 nt, synthetic construct
  source 1..22: mol_type = other RNA
gcagagtggtcagcacagagtg

SEQ ID NO: 6966 - RNA, 22 nt, synthetic construct
  source 1..22: mol_type = other RNA
gcagagttccggcggcacagca

SEQ ID NO: 6967 - RNA, 22 nt, synthetic construct
  source 1..22: mol_type = other RNA
gcagatagaccagactgagcta

SEQ ID NO: 6968 - RNA, 22 nt, synthetic construct
  source 1..22: mol_type = other RNA
gcagcaacacagcagagagcaa

SEQ ID NO: 6969 - RNA, 22 nt, synthetic construct
  source 1..22: mol_type = other RNA
gcagcctgtgctgacccatgca

SEQ ID NO: 6970 - RNA, 22 nt, synthetic construct
  source 1..22: mol_type = other RNA
gcagcgcaaagtgacaatggcc

SEQ ID NO: 6971 - RNA, 22 nt, synthetic construct
  source 1..22: mol_type = other RNA
gcagcgccgagaaggaagtgct

SEQ ID NO: 6972 - RNA, 22 nt, synthetic construct
  source 1..22: mol_type = other RNA
gcagcgttagagggcagagttc

SEQ ID NO: 6973 - RNA, 22 nt, synthetic construct
  source 1..22: mol_type = other RNA
gcagctcccctaccccccttac

SEQ ID NO: 6974 - RNA, 22 nt, synthetic construct
  source 1..22: mol_type = other RNA
gcagcttgtggcctgggtcacc

SEQ ID NO: 6975 - RNA, 22 nt, synthetic construct
  source 1..22: mol_type = other RNA
gcaggacctgcctgggaagggg

SEQ ID NO: 6976 - RNA, 22 nt, synthetic construct
  source 1..22: mol_type = other RNA
gcaggcctacaagaaggggagg

SEQ ID NO: 6977 - RNA, 22 nt, synthetic construct
  source 1..22: mol_type = other RNA
gcagggaaggagacaaagtcca

SEQ ID NO: 6978 - RNA, 22 nt, synthetic construct
  source 1..22: mol_type = other RNA
gcagggaaggatctgggccagc

SEQ ID NO: 6979 - RNA, 22 nt, synthetic construct
  source 1..22: mol_type = other RNA
gcagggcagggaaggagacaaa

SEQ ID NO: 6980 - RNA, 22 nt, synthetic construct
  source 1..22: mol_type = other RNA
gcaggtcagagaaagcaggacc

SEQ ID NO: 6981 - RNA, 22 nt, synthetic construct
  source 1..22: mol_type = other RNA
gcaggtcctgctttctctgacc

SEQ ID NO: 6982 - RNA, 22 nt, synthetic construct
  source 1..22: mol_type = other RNA
gcagtcctccttaccatccctc

SEQ ID NO: 6983 - RNA, 22 nt, synthetic construct
  source 1..22: mol_type = other RNA
gcatagggtggcaaagcccagg

SEQ ID NO: 6984 - RNA, 22 nt, synthetic construct
  source 1..22: mol_type = other RNA
gcatcatcaccgtttttctgga

SEQ ID NO: 6985 - RNA, 22 nt, synthetic construct
  source 1..22: mol_type = other RNA
gcatccttgggcagcaacacag

SEQ ID NO: 6986 - RNA, 22 nt, synthetic construct
  source 1..22: mol_type = other RNA
gcatctctcctccctcacccaa

SEQ ID NO: 6987 - RNA, 22 nt, synthetic construct
  source 1..22: mol_type = other RNA
gcatggggttgggtgagggagg

SEQ ID NO: 6988 - RNA, 22 nt, synthetic construct
  source 1..22: mol_type = other RNA
gcatgggtcagcacaggctgcc

SEQ ID NO: 6989 - RNA, 22 nt, synthetic construct
  source 1..22: mol_type = other RNA
gcattctctcccctgggcctgt

SEQ ID NO: 6990 - RNA, 22 nt, synthetic construct
  source 1..22: mol_type = other RNA
gcattggagtcgctttaactgg

SEQ ID NO: 6991 - RNA, 22 nt, synthetic construct
  source 1..22: mol_type = other RNA
gccaaagccagggccagttaaa

SEQ ID NO: 6992 - RNA, 22 nt, synthetic construct
  source 1..22: mol_type = other RNA
gccacaagctgcagacagaaag

SEQ ID NO: 6993 - RNA, 22 nt, synthetic construct
  source 1..22: mol_type = other RNA
gccaccctatgctgacaccccg

SEQ ID NO: 6994 - RNA, 22 nt, synthetic construct
  source 1..22: mol_type = other RNA
gccacctctccatcctcttgct

SEQ ID NO: 6995 - RNA, 22 nt, synthetic construct
  source 1..22: mol_type = other RNA
gccactctgtgctgaccactct

SEQ ID NO: 6996 - RNA, 22 nt, synthetic construct
  source 1..22: mol_type = other RNA
gccagaggcggcgcagaagcca

SEQ ID NO: 6997 - RNA, 22 nt, synthetic construct
  source 1..22: mol_type = other RNA
gccagccgtagaggtgacccag

SEQ ID NO: 6998 - RNA, 22 nt, synthetic construct
  source 1..22: mol_type = other RNA
gccagctcccatagctcagtct

SEQ ID NO: 6999 - RNA, 22 nt, synthetic construct
  source 1..22: mol_type = other RNA
gccaggcagatagaccagactg

SEQ ID NO: 7000 - RNA, 22 nt, synthetic construct
  source 1..22: mol_type = other RNA
gccagggagacggggtactttg

SEQ ID NO: 7001 - RNA, 22 nt, synthetic construct
  source 1..22: mol_type = other RNA
gccagggccaggcagatagacc

SEQ ID NO: 7002 - RNA, 22 nt, synthetic construct
  source 1..22: mol_type = other RNA
gccagggccagttaaagcgact

SEQ ID NO: 7003 - RNA, 22 nt, synthetic construct
  source 1..22: mol_type = other RNA
gccagtagagctcaaagtggtc

SEQ ID NO: 7004 - RNA, 22 nt, synthetic construct
  source 1..22: mol_type = other RNA
gccagttaaagcgactccaatg

SEQ ID NO: 7005 - RNA, 22 nt, synthetic construct
  source 1..22: mol_type = other RNA
gccagttgaagcggctccaatt

SEQ ID NO: 7006 - RNA, 22 nt, synthetic construct
  source 1..22: mol_type = other RNA
gccatcctaagaaacgagagat

SEQ ID NO: 7007 - RNA, 22 nt, synthetic construct
  source 1..22: mol_type = other RNA
gccatctctcgtttcttaggat

SEQ ID NO: 7008 - RNA, 22 nt, synthetic construct
  source 1..22: mol_type = other RNA
gccattgtcactttgcgctgcc

SEQ ID NO: 7009 - RNA, 22 nt, synthetic construct
  source 1..22: mol_type = other RNA
gcccaaatgaaaggagtgagag

SEQ ID NO: 7010 - RNA, 22 nt, synthetic construct
  source 1..22: mol_type = other RNA
gcccaaggatgctctttccgga

SEQ ID NO: 7011 - RNA, 22 nt, synthetic construct
  source 1..22: mol_type = other RNA
gcccactgtttccccttcccag

SEQ ID NO: 7012 - RNA, 22 nt, synthetic construct
  source 1..22: mol_type = other RNA
gcccagatccttccctgccgcc

SEQ ID NO: 7013 - RNA, 22 nt, synthetic construct
  source 1..22: mol_type = other RNA
gcccagggccagttgaagcggc

SEQ ID NO: 7014 - RNA, 22 nt, synthetic construct
  source 1..22: mol_type = other RNA
gcccaggggagagaatgcaggt

SEQ ID NO: 7015 - RNA, 22 nt, synthetic construct
  source 1..22: mol_type = other RNA
gccccagaaggagaaggaaaag

SEQ ID NO: 7016 - RNA, 22 nt, synthetic construct
  source 1..22: mol_type = other RNA
gccccaggcctccttaccattc

SEQ ID NO: 7017 - RNA, 22 nt, synthetic construct
  source 1..22: mol_type = other RNA
gcccccgagtgcccttgctgtg

SEQ ID NO: 7018 - RNA, 22 nt, synthetic construct
  source 1..22: mol_type = other RNA
gccccgtcgttcctggccctgg

SEQ ID NO: 7019 - RNA, 22 nt, synthetic construct
  source 1..22: mol_type = other RNA
gcccctccagccggtcctggac

SEQ ID NO: 7020 - RNA, 22 nt, synthetic construct
  source 1..22: mol_type = other RNA
gcccggagaggacccagacacg

SEQ ID NO: 7021 - RNA, 22 nt, synthetic construct
  source 1..22: mol_type = other RNA
gccctcctctcgcccccgagtg

SEQ ID NO: 7022 - RNA, 22 nt, synthetic construct
  source 1..22: mol_type = other RNA
gccctctaacgctgccgtctct

SEQ ID NO: 7023 - RNA, 22 nt, synthetic construct
  source 1..22: mol_type = other RNA
gccctctcctgaacctgagcca

SEQ ID NO: 7024 - RNA, 22 nt, synthetic construct
  source 1..22: mol_type = other RNA
gccctgccctctcctgaacctg

SEQ ID NO: 7025 - RNA, 22 nt, synthetic construct
  source 1..22: mol_type = other RNA
gccctggccattgtcactttgc

SEQ ID NO: 7026 - RNA, 22 nt, synthetic construct
  source 1..22: mol_type = other RNA
gccctggctttggcagcctgtg

SEQ ID NO: 7027 - RNA, 22 nt, synthetic construct
  source 1..22: mol_type = other RNA
gccctgggcttagccactctgt

SEQ ID NO: 7028 - RNA, 22 nt, synthetic construct
  source 1..22: mol_type = other RNA
gccctgggctttgccaccctat

SEQ ID NO: 7029 - RNA, 22 nt, synthetic construct
  source 1..22: mol_type = other RNA
gcccttgctgtgccgccggaac

SEQ ID NO: 7030 - RNA, 22 nt, synthetic construct
  source 1..22: mol_type = other RNA
gccgagaaggaagtgctccgga

SEQ ID NO: 7031 - RNA, 22 nt, synthetic construct
  source 1..22: mol_type = other RNA
gccgccggaactctgccctcta

SEQ ID NO: 7032 - RNA, 22 nt, synthetic construct
  source 1..22: mol_type = other RNA
gccgcctccttcaggttccgtc

SEQ ID NO: 7033 - RNA, 22 nt, synthetic construct
  source 1..22: mol_type = other RNA
gccgcctctggcccactgtttc

SEQ ID NO: 7034 - RNA, 22 nt, synthetic construct
  source 1..22: mol_type = other RNA
gccgcttcaactggccctgggc

SEQ ID NO: 7035 - RNA, 22 nt, synthetic construct
  source 1..22: mol_type = other RNA
gccgctttctgtctgcagcttg

SEQ ID NO: 7036 - RNA, 22 nt, synthetic construct
  source 1..22: mol_type = other RNA
gccggaactctgccctctaacg

SEQ ID NO: 7037 - RNA, 22 nt, synthetic construct
  source 1..22: mol_type = other RNA
gccggtcctggactttgtctcc

SEQ ID NO: 7038 - RNA, 22 nt, synthetic construct
  source 1..22: mol_type = other RNA
gccgtagaggtgacccaggcca

SEQ ID NO: 7039 - RNA, 22 nt, synthetic construct
  source 1..22: mol_type = other RNA
gccgtctctctcctgagtccgg

SEQ ID NO: 7040 - RNA, 22 nt, synthetic construct
  source 1..22: mol_type = other RNA
gccgtcttcactcgctgggttc

SEQ ID NO: 7041 - RNA, 22 nt, synthetic construct
  source 1..22: mol_type = other RNA
gcctacaagaaggggaggcggg

SEQ ID NO: 7042 - RNA, 22 nt, synthetic construct
  source 1..22: mol_type = other RNA
gcctccccttcttgtaggcctg

SEQ ID NO: 7043 - RNA, 22 nt, synthetic construct
  source 1..22: mol_type = other RNA
gcctccttaccattccccttcg

SEQ ID NO: 7044 - RNA, 22 nt, synthetic construct
  source 1..22: mol_type = other RNA
gcctccttcaggttccgtcttc

SEQ ID NO: 7045 - RNA, 22 nt, synthetic construct
  source 1..22: mol_type = other RNA
gcctctggcccactgtttcccc

SEQ ID NO: 7046 - RNA, 22 nt, synthetic construct
  source 1..22: mol_type = other RNA
gcctgcatcatcaccgtttttc

SEQ ID NO: 7047 - RNA, 22 nt, synthetic construct
  source 1..22: mol_type = other RNA
gcctggacaccccgttctcctg

SEQ ID NO: 7048 - RNA, 22 nt, synthetic construct
  source 1..22: mol_type = other RNA
gcctggccctggccattgtcac

SEQ ID NO: 7049 - RNA, 22 nt, synthetic construct
  source 1..22: mol_type = other RNA
gcctgggaaggggaaacagtgg

SEQ ID NO: 7050 - RNA, 22 nt, synthetic construct
  source 1..22: mol_type = other RNA
gcctggggcagagtggtcagca

SEQ ID NO: 7051 - RNA, 22 nt, synthetic construct
  source 1..22: mol_type = other RNA
gcctgggtcacctctacggctg

SEQ ID NO: 7052 - RNA, 22 nt, synthetic construct
  source 1..22: mol_type = other RNA
gcctgtgccatctctcgtttct

SEQ ID NO: 7053 - RNA, 22 nt, synthetic construct
  source 1..22: mol_type = other RNA
gcctgtgccgctttctgtctgc

SEQ ID NO: 7054 - RNA, 22 nt, synthetic construct
  source 1..22: mol_type = other RNA
gcctgtgctgacccatgcagtc

SEQ ID NO: 7055 - RNA, 22 nt, synthetic construct
  source 1..22: mol_type = other RNA
gccttctccgacggatgtctcc

SEQ ID NO: 7056 - RNA, 22 nt, synthetic construct
  source 1..22: mol_type = other RNA
gcgactccaatgcggaagagag

SEQ ID NO: 7057 - RNA, 22 nt, synthetic construct
  source 1..22: mol_type = other RNA
gcgagaggagggcagcgcaaag

SEQ ID NO: 7058 - RNA, 22 nt, synthetic construct
  source 1..22: mol_type = other RNA
gcgagtgaagacggcatggggt

SEQ ID NO: 7059 - RNA, 22 nt, synthetic construct
  source 1..22: mol_type = other RNA
gcgcaaagtgacaatggccagg

SEQ ID NO: 7060 - RNA, 22 nt, synthetic construct
  source 1..22: mol_type = other RNA
gcgcagaagccagtagagctca

SEQ ID NO: 7061 - RNA, 22 nt, synthetic construct
  source 1..22: mol_type = other RNA
gcgccgagaaggaagtgctccg

SEQ ID NO: 7062 - RNA, 22 nt, synthetic construct
  source 1..22: mol_type = other RNA
gcgccgcctctggcccactgtt

SEQ ID NO: 7063 - RNA, 22 nt, synthetic construct
  source 1..22: mol_type = other RNA
gcgctgcaccacgtgatgtcct

SEQ ID NO: 7064 - RNA, 22 nt, synthetic construct
  source 1..22: mol_type = other RNA
gcgctgccctcctctcgccccc

SEQ ID NO: 7065 - RNA, 22 nt, synthetic construct
  source 1..22: mol_type = other RNA
gcggaagagagtaggtcgaagg

SEQ ID NO: 7066 - RNA, 22 nt, synthetic construct
  source 1..22: mol_type = other RNA
gcggatcctccccgtgtctggg

SEQ ID NO: 7067 - RNA, 22 nt, synthetic construct
  source 1..22: mol_type = other RNA
gcggcacagcaagggcactcgg

SEQ ID NO: 7068 - RNA, 22 nt, synthetic construct
  source 1..22: mol_type = other RNA
gcggcacaggcccaggggagag

SEQ ID NO: 7069 - RNA, 22 nt, synthetic construct
  source 1..22: mol_type = other RNA
gcggcagggaaggatctgggcc

SEQ ID NO: 7070 - RNA, 22 nt, synthetic construct
  source 1..22: mol_type = other RNA
gcggcgcagaagccagtagagc

SEQ ID NO: 7071 - RNA, 22 nt, synthetic construct
  source 1..22: mol_type = other RNA
gcggctccaattcggaagtggg

SEQ ID NO: 7072 - RNA, 22 nt, synthetic construct
  source 1..22: mol_type = other RNA
gcgggacgcaagggagacatcc

SEQ ID NO: 7073 - RNA, 22 nt, synthetic construct
  source 1..22: mol_type = other RNA
gcgtcccgcctccccttcttgt

SEQ ID NO: 7074 - RNA, 22 nt, synthetic construct
  source 1..22: mol_type = other RNA
gcgttagagggcagagttccgg

SEQ ID NO: 7075 - RNA, 22 nt, synthetic construct
  source 1..22: mol_type = other RNA
gctaaagccagggagacggggt

SEQ ID NO: 7076 - RNA, 22 nt, synthetic construct
  source 1..22: mol_type = other RNA
gctaagcccagggccagttgaa

SEQ ID NO: 7077 - RNA, 22 nt, synthetic construct
  source 1..22: mol_type = other RNA
gctagcacagactagagaggta

SEQ ID NO: 7078 - RNA, 22 nt, synthetic construct
  source 1..22: mol_type = other RNA
gctatgggagctggctcaggtt

SEQ ID NO: 7079 - RNA, 22 nt, synthetic construct
  source 1..22: mol_type = other RNA
gctcaaagtggtccggactcag

SEQ ID NO: 7080 - RNA, 22 nt, synthetic construct
  source 1..22: mol_type = other RNA
gctcaacatcggaagaggggaa

SEQ ID NO: 7081 - RNA, 22 nt, synthetic construct
  source 1..22: mol_type = other RNA
gctcagaggacatcacgtggtg

SEQ ID NO: 7082 - RNA, 22 nt, synthetic construct
  source 1..22: mol_type = other RNA
gctcaggttcaggagagggcag

SEQ ID NO: 7083 - RNA, 22 nt, synthetic construct
  source 1..22: mol_type = other RNA
gctcagtctggtctatctgcct

SEQ ID NO: 7084 - RNA, 22 nt, synthetic construct
  source 1..22: mol_type = other RNA
gctccaattcggaagtggggtg

SEQ ID NO: 7085 - RNA, 22 nt, synthetic construct
  source 1..22: mol_type = other RNA
gctcccatagctcagtctggtc

SEQ ID NO: 7086 - RNA, 22 nt, synthetic construct
  source 1..22: mol_type = other RNA
gctcccctaccccccttacctc

SEQ ID NO: 7087 - RNA, 22 nt, synthetic construct
  source 1..22: mol_type = other RNA
gctccggaaagagcatccttgg

SEQ ID NO: 7088 - RNA, 22 nt, synthetic construct
  source 1..22: mol_type = other RNA
gctctactggcttctgcgccgc

SEQ ID NO: 7089 - RNA, 22 nt, synthetic construct
  source 1..22: mol_type = other RNA
gctctctgctgtgttgctgccc

SEQ ID NO: 7090 - RNA, 22 nt, synthetic construct
  source 1..22: mol_type = other RNA
gctctttccggagcacttcctt

SEQ ID NO: 7091 - RNA, 22 nt, synthetic construct
  source 1..22: mol_type = other RNA
gctgacaccccgtcccagtccc

SEQ ID NO: 7092 - RNA, 22 nt, synthetic construct
  source 1..22: mol_type = other RNA
gctgaccactctgccccaggcc

SEQ ID NO: 7093 - RNA, 22 nt, synthetic construct
  source 1..22: mol_type = other RNA
gctgacccatgcagtcctcctt

SEQ ID NO: 7094 - RNA, 22 nt, synthetic construct
  source 1..22: mol_type = other RNA
gctgcaccacgtgatgtcctct

SEQ ID NO: 7095 - RNA, 22 nt, synthetic construct
  source 1..22: mol_type = other RNA
gctgcagacagaaagcggcaca

SEQ ID NO: 7096 - RNA, 22 nt, synthetic construct
  source 1..22: mol_type = other RNA
gctgccaaagccagggccagtt

SEQ ID NO: 7097 - RNA, 22 nt, synthetic construct
  source 1..22: mol_type = other RNA
gctgcccaaatgaaaggagtga

SEQ ID NO: 7098 - RNA, 22 nt, synthetic construct
  source 1..22: mol_type = other RNA
gctgcccaaggatgctctttcc

SEQ ID NO: 7099 - RNA, 22 nt, synthetic construct
  source 1..22: mol_type = other RNA
gctgccctcctctcgcccccga

SEQ ID NO: 7100 - RNA, 22 nt, synthetic construct
  source 1..22: mol_type = other RNA
gctgccgtctctctcctgagtc

SEQ ID NO: 7101 - RNA, 22 nt, synthetic construct
  source 1..22: mol_type = other RNA
gctggaggggctcaacatcgga

SEQ ID NO: 7102 - RNA, 22 nt, synthetic construct
  source 1..22: mol_type = other RNA
gctggcccagatccttccctgc

SEQ ID NO: 7103 - RNA, 22 nt, synthetic construct
  source 1..22: mol_type = other RNA
gctggctcaggttcaggagagg

SEQ ID NO: 7104 - RNA, 22 nt, synthetic construct
  source 1..22: mol_type = other RNA
gctgggttcccttttccttctc

SEQ ID NO: 7105 - RNA, 22 nt, synthetic construct
  source 1..22: mol_type = other RNA
gctgtgccgccggaactctgcc

SEQ ID NO: 7106 - RNA, 22 nt, synthetic construct
  source 1..22: mol_type = other RNA
gctgtgttgctgcccaaggatg

SEQ ID NO: 7107 - RNA, 22 nt, synthetic construct
  source 1..22: mol_type = other RNA
gcttagccactctgtgctgacc

SEQ ID NO: 7108 - RNA, 22 nt, synthetic construct
  source 1..22: mol_type = other RNA
gcttcaactggccctgggctta

SEQ ID NO: 7109 - RNA, 22 nt, synthetic construct
  source 1..22: mol_type = other RNA
gcttctgcgccgcctctggccc

SEQ ID NO: 7110 - RNA, 22 nt, synthetic construct
  source 1..22: mol_type = other RNA
gcttgtggcctgggtcacctct

SEQ ID NO: 7111 - RNA, 22 nt, synthetic construct
  source 1..22: mol_type = other RNA
gctttaactggccctggctttg

SEQ ID NO: 7112 - RNA, 22 nt, synthetic construct
  source 1..22: mol_type = other RNA
gctttagccacctctccatcct

SEQ ID NO: 7113 - RNA, 22 nt, synthetic construct
  source 1..22: mol_type = other RNA
gctttctctgacctgcattctc

SEQ ID NO: 7114 - RNA, 22 nt, synthetic construct
  source 1..22: mol_type = other RNA
gctttctgtctgcagcttgtgg

SEQ ID NO: 7115 - RNA, 22 nt, synthetic construct
  source 1..22: mol_type = other RNA
gctttctttgcctggacacccc

SEQ ID NO: 7116 - RNA, 22 nt, synthetic construct
  source 1..22: mol_type = other RNA
gctttgccaccctatgctgaca

SEQ ID NO: 7117 - RNA, 22 nt, synthetic construct
  source 1..22: mol_type = other RNA
gctttggcagcctgtgctgacc

SEQ ID NO: 7118 - RNA, 22 nt, synthetic construct
  source 1..22: mol_type = other RNA
ggaaaagggaacccagcgagtg

SEQ ID NO: 7119 - RNA, 22 nt, synthetic construct
  source 1..22: mol_type = other RNA
ggaaacagtgggccagaggcgg

SEQ ID NO: 7120 - RNA, 22 nt, synthetic construct
  source 1..22: mol_type = other RNA
ggaaagagcatccttgggcagc

SEQ ID NO: 7121 - RNA, 22 nt, synthetic construct
  source 1..22: mol_type = other RNA
ggaacccagcgagtgaagacgg

SEQ ID NO: 7122 - RNA, 22 nt, synthetic construct
  source 1..22: mol_type = other RNA
ggaacctgaaggaggcggcagg

SEQ ID NO: 7123 - RNA, 22 nt, synthetic construct
  source 1..22: mol_type = other RNA
ggaactctgccctctaacgctg

SEQ ID NO: 7124 - RNA, 22 nt, synthetic construct
  source 1..22: mol_type = other RNA
ggaagacggaacctgaaggagg

SEQ ID NO: 7125 - RNA, 22 nt, synthetic construct
  source 1..22: mol_type = other RNA
ggaagagagtaggtcgaagggg

SEQ ID NO: 7126 - RNA, 22 nt, synthetic construct
  source 1..22: mol_type = other RNA
ggaagagggagtggaggaagac

SEQ ID NO: 7127 - RNA, 22 nt, synthetic construct
  source 1..22: mol_type = other RNA
ggaagaggggaagtcgagggag

SEQ ID NO: 7128 - RNA, 22 nt, synthetic construct
  source 1..22: mol_type = other RNA
ggaaggagacaaagtccaggac

SEQ ID NO: 7129 - RNA, 22 nt, synthetic construct
  source 1..22: mol_type = other RNA
ggaaggatctgggccagccgta

SEQ ID NO: 7130 - RNA, 22 nt, synthetic construct
  source 1..22: mol_type = other RNA
ggaaggggaaacagtgggccag

SEQ ID NO: 7131 - RNA, 22 nt, synthetic construct
  source 1..22: mol_type = other RNA
ggaagtcgagggagggatggta

SEQ ID NO: 7132 - RNA, 22 nt, synthetic construct
  source 1..22: mol_type = other RNA
ggaagtgctccggaaagagcat

SEQ ID NO: 7133 - RNA, 22 nt, synthetic construct
  source 1..22: mol_type = other RNA
ggaagtggggtggtcgaagggg

SEQ ID NO: 7134 - RNA, 22 nt, synthetic construct
  source 1..22: mol_type = other RNA
ggaatggtaaggaggcctgggg

SEQ ID NO: 7135 - RNA, 22 nt, synthetic construct
  source 1..22: mol_type = other RNA
ggaatggtaagggggactggga

SEQ ID NO: 7136 - RNA, 22 nt, synthetic construct
  source 1..22: mol_type = other RNA
ggacaaccccaaagtaccccgt

SEQ ID NO: 7137 - RNA, 22 nt, synthetic construct
  source 1..22: mol_type = other RNA
ggacaccccgttctcctgtgga

SEQ ID NO: 7138 - RNA, 22 nt, synthetic construct
  source 1..22: mol_type = other RNA
ggacatcacgtggtgcagcgcc

SEQ ID NO: 7139 - RNA, 22 nt, synthetic construct
  source 1..22: mol_type = other RNA
ggaccactttgagctctactgg

SEQ ID NO: 7140 - RNA, 22 nt, synthetic construct
  source 1..22: mol_type = other RNA
ggacccagacacggggaggatc

SEQ ID NO: 7141 - RNA, 22 nt, synthetic construct
  source 1..22: mol_type = other RNA
ggaccggctggaggggctcaac

SEQ ID NO: 7142 - RNA, 22 nt, synthetic construct
  source 1..22: mol_type = other RNA
ggacctgcctgggaaggggaaa

SEQ ID NO: 7143 - RNA, 22 nt, synthetic construct
  source 1..22: mol_type = other RNA
ggacgcaagggagacatccgtc

SEQ ID NO: 7144 - RNA, 22 nt, synthetic construct
  source 1..22: mol_type = other RNA
ggacggggtgtcagcatagggt

SEQ ID NO: 7145 - RNA, 22 nt, synthetic construct
  source 1..22: mol_type = other RNA
ggactcaggagagagacggcag

SEQ ID NO: 7146 - RNA, 22 nt, synthetic construct
  source 1..22: mol_type = other RNA
ggactgcatgggtcagcacagg

SEQ ID NO: 7147 - RNA, 22 nt, synthetic construct
  source 1..22: mol_type = other RNA
ggactgggacggggtgtcagca

SEQ ID NO: 7148 - RNA, 22 nt, synthetic construct
  source 1..22: mol_type = other RNA
ggactttgtctccttccctgcc

SEQ ID NO: 7149 - RNA, 22 nt, synthetic construct
  source 1..22: mol_type = other RNA
ggagaacggggtgtccaggcaa

SEQ ID NO: 7150 - RNA, 22 nt, synthetic construct
  source 1..22: mol_type = other RNA
ggagaaggaaaagggaacccag

SEQ ID NO: 7151 - RNA, 22 nt, synthetic construct
  source 1..22: mol_type = other RNA
ggagaaggccatcctaagaaac

SEQ ID NO: 7152 - RNA, 22 nt, synthetic construct
  source 1..22: mol_type = other RNA
ggagacaaagtccaggaccggc

SEQ ID NO: 7153 - RNA, 22 nt, synthetic construct
  source 1..22: mol_type = other RNA
ggagacatccgtcggagaaggc

SEQ ID NO: 7154 - RNA, 22 nt, synthetic construct
  source 1..22: mol_type = other RNA
ggagacggggtactttggggtt

SEQ ID NO: 7155 - RNA, 22 nt, synthetic construct
  source 1..22: mol_type = other RNA
ggagagaatgcaggtcagagaa

SEQ ID NO: 7156 - RNA, 22 nt, synthetic construct
  source 1..22: mol_type = other RNA
ggagagagacggcagcgttaga

SEQ ID NO: 7157 - RNA, 22 nt, synthetic construct
  source 1..22: mol_type = other RNA
ggagagatgcccggagaggacc

SEQ ID NO: 7158 - RNA, 22 nt, synthetic construct
  source 1..22: mol_type = other RNA
ggagaggacccagacacgggga

SEQ ID NO: 7159 - RNA, 22 nt, synthetic construct
  source 1..22: mol_type = other RNA
ggagagggcagggcagggaagg

SEQ ID NO: 7160 - RNA, 22 nt, synthetic construct
  source 1..22: mol_type = other RNA
ggagaggtggctaaagccaggg

SEQ ID NO: 7161 - RNA, 22 nt, synthetic construct
  source 1..22: mol_type = other RNA
ggagcacttccttctcggcgct

SEQ ID NO: 7162 - RNA, 22 nt, synthetic construct
  source 1..22: mol_type = other RNA
ggagccgcttcaactggccctg

SEQ ID NO: 7163 - RNA, 22 nt, synthetic construct
  source 1..22: mol_type = other RNA
ggagctgcccaaatgaaaggag

SEQ ID NO: 7164 - RNA, 22 nt, synthetic construct
  source 1..22: mol_type = other RNA
ggagctggctcaggttcaggag

SEQ ID NO: 7165 - RNA, 22 nt, synthetic construct
  source 1..22: mol_type = other RNA
ggaggaagacggaacctgaagg

SEQ ID NO: 7166 - RNA, 22 nt, synthetic construct
  source 1..22: mol_type = other RNA
ggaggactgcatgggtcagcac

SEQ ID NO: 7167 - RNA, 22 nt, synthetic construct
  source 1..22: mol_type = other RNA
ggaggagagatgcccggagagg

SEQ ID NO: 7168 - RNA, 22 nt, synthetic construct
  source 1..22: mol_type = other RNA
ggaggatccgctcagaggacat

SEQ ID NO: 7169 - RNA, 22 nt, synthetic construct
  source 1..22: mol_type = other RNA
ggaggcctggggcagagtggtc

SEQ ID NO: 7170 - RNA, 22 nt, synthetic construct
  source 1..22: mol_type = other RNA
ggaggcggcagggaaggatctg

SEQ ID NO: 7171 - RNA, 22 nt, synthetic construct
  source 1..22: mol_type = other RNA
ggaggcgggacgcaagggagac

SEQ ID NO: 7172 - RNA, 22 nt, synthetic construct
  source 1..22: mol_type = other RNA
ggagggatggtaaggaggactg

SEQ ID NO: 7173 - RNA, 22 nt, synthetic construct
  source 1..22: mol_type = other RNA
ggagggcagcgcaaagtgacaa

SEQ ID NO: 7174 - RNA, 22 nt, synthetic construct
  source 1..22: mol_type = other RNA
ggaggggctcaacatcggaaga

SEQ ID NO: 7175 - RNA, 22 nt, synthetic construct
  source 1..22: mol_type = other RNA
ggagtcgctttaactggccctg

SEQ ID NO: 7176 - RNA, 22 nt, synthetic construct
  source 1..22: mol_type = other RNA
ggagtgagaggtgacccgaatc

SEQ ID NO: 7177 - RNA, 22 nt, synthetic construct
  source 1..22: mol_type = other RNA
ggagtggaggaagacggaacct

SEQ ID NO: 7178 - RNA, 22 nt, synthetic construct
  source 1..22: mol_type = other RNA
ggatccgctcagaggacatcac

SEQ ID NO: 7179 - RNA, 22 nt, synthetic construct
  source 1..22: mol_type = other RNA
ggatcctccccgtgtctgggtc

SEQ ID NO: 7180 - RNA, 22 nt, synthetic construct
  source 1..22: mol_type = other RNA
ggatctgggccagccgtagagg

SEQ ID NO: 7181 - RNA, 22 nt, synthetic construct
  source 1..22: mol_type = other RNA
ggatgctctttccggagcactt

SEQ ID NO: 7182 - RNA, 22 nt, synthetic construct
  source 1..22: mol_type = other RNA
ggatggagaggtggctaaagcc

SEQ ID NO: 7183 - RNA, 22 nt, synthetic construct
  source 1..22: mol_type = other RNA
ggatggccttctccgacggatg

SEQ ID NO: 7184 - RNA, 22 nt, synthetic construct
  source 1..22: mol_type = other RNA
ggatggtaaggaggactgcatg

SEQ ID NO: 7185 - RNA, 22 nt, synthetic construct
  source 1..22: mol_type = other RNA
ggatgtctcccttgcgtcccgc

SEQ ID NO: 7186 - RNA, 22 nt, synthetic construct
  source 1..22: mol_type = other RNA
ggattcgggtcacctctcactc

SEQ ID NO: 7187 - RNA, 22 nt, synthetic construct
  source 1..22: mol_type = other RNA
ggcaaagaaagcaagaggatgg

SEQ ID NO: 7188 - RNA, 22 nt, synthetic construct
  source 1..22: mol_type = other RNA
ggcaaagcccagggccaggaac

SEQ ID NO: 7189 - RNA, 22 nt, synthetic construct
  source 1..22: mol_type = other RNA
ggcacagcaagggcactcgggg

SEQ ID NO: 7190 - RNA, 22 nt, synthetic construct
  source 1..22: mol_type = other RNA
ggcacaggcccaggggagagaa

SEQ ID NO: 7191 - RNA, 22 nt, synthetic construct
  source 1..22: mol_type = other RNA
ggcacaggccccagaaggagaa

SEQ ID NO: 7192 - RNA, 22 nt, synthetic construct
  source 1..22: mol_type = other RNA
ggcactcgggggcgagaggagg

SEQ ID NO: 7193 - RNA, 22 nt, synthetic construct
  source 1..22: mol_type = other RNA
ggcagagtggtcagcacagagt

SEQ ID NO: 7194 - RNA, 22 nt, synthetic construct
  source 1..22: mol_type = other RNA
ggcagagttccggcggcacagc

SEQ ID NO: 7195 - RNA, 22 nt, synthetic construct
  source 1..22: mol_type = other RNA
ggcagatagaccagactgagct

SEQ ID NO: 7196 - RNA, 22 nt, synthetic construct
  source 1..22: mol_type = other RNA
ggcagcaacacagcagagagca

SEQ ID NO: 7197 - RNA, 22 nt, synthetic construct
  source 1..22: mol_type = other RNA
ggcagcctgtgctgacccatgc

SEQ ID NO: 7198 - RNA, 22 nt, synthetic construct
  source 1..22: mol_type = other RNA
ggcagcgcaaagtgacaatggc

SEQ ID NO: 7199 - RNA, 22 nt, synthetic construct
  source 1..22: mol_type = other RNA
ggcagcgttagagggcagagtt

SEQ ID NO: 7200 - RNA, 22 nt, synthetic construct
  source 1..22: mol_type = other RNA
ggcagctcccctacccccctta

SEQ ID NO: 7201 - RNA, 22 nt, synthetic construct
  source 1..22: mol_type = other RNA
ggcagggaaggagacaaagtcc

SEQ ID NO: 7202 - RNA, 22 nt, synthetic construct
  source 1..22: mol_type = other RNA
ggcagggaaggatctgggccag

SEQ ID NO: 7203 - RNA, 22 nt, synthetic construct
  source 1..22: mol_type = other RNA
ggcagggcagggaaggagacaa

SEQ ID NO: 7204 - RNA, 22 nt, synthetic construct
  source 1..22: mol_type = other RNA
ggcaggtcctgctttctctgac

SEQ ID NO: 7205 - RNA, 22 nt, synthetic construct
  source 1..22: mol_type = other RNA
ggcatctctcctccctcaccca

SEQ ID NO: 7206 - RNA, 22 nt, synthetic construct
  source 1..22: mol_type = other RNA
ggcatggggttgggtgagggag

SEQ ID NO: 7207 - RNA, 22 nt, synthetic construct
  source 1..22: mol_type = other RNA
ggccacaagctgcagacagaaa

SEQ ID NO: 7208 - RNA, 22 nt, synthetic construct
  source 1..22: mol_type = other RNA
ggccagaggcggcgcagaagcc

SEQ ID NO: 7209 - RNA, 22 nt, synthetic construct
  source 1..22: mol_type = other RNA
ggccagccgtagaggtgaccca

SEQ ID NO: 7210 - RNA, 22 nt, synthetic construct
  source 1..22: mol_type = other RNA
ggccaggcagatagaccagact

SEQ ID NO: 7211 - RNA, 22 nt, synthetic construct
  source 1..22: mol_type = other RNA
ggccagggccaggcagatagac

SEQ ID NO: 7212 - RNA, 22 nt, synthetic construct
  source 1..22: mol_type = other RNA
ggccagttaaagcgactccaat

SEQ ID NO: 7213 - RNA, 22 nt, synthetic construct
  source 1..22: mol_type = other RNA
ggccagttgaagcggctccaat

SEQ ID NO: 7214 - RNA, 22 nt, synthetic construct
  source 1..22: mol_type = other RNA
ggccatcctaagaaacgagaga

SEQ ID NO: 7215 - RNA, 22 nt, synthetic construct
  source 1..22: mol_type = other RNA
ggccattgtcactttgcgctgc

SEQ ID NO: 7216 - RNA, 22 nt, synthetic construct
  source 1..22: mol_type = other RNA
ggcccactgtttccccttccca

SEQ ID NO: 7217 - RNA, 22 nt, synthetic construct
  source 1..22: mol_type = other RNA
ggcccagatccttccctgccgc

SEQ ID NO: 7218 - RNA, 22 nt, synthetic construct
  source 1..22: mol_type = other RNA
ggcccaggggagagaatgcagg

SEQ ID NO: 7219 - RNA, 22 nt, synthetic construct
  source 1..22: mol_type = other RNA
ggccccagaaggagaaggaaaa

SEQ ID NO: 7220 - RNA, 22 nt, synthetic construct
  source 1..22: mol_type = other RNA
ggccctggccattgtcactttg

SEQ ID NO: 7221 - RNA, 22 nt, synthetic construct
  source 1..22: mol_type = other RNA
ggccctggctttggcagcctgt

SEQ ID NO: 7222 - RNA, 22 nt, synthetic construct
  source 1..22: mol_type = other RNA
ggccctgggcttagccactctg

SEQ ID NO: 7223 - RNA, 22 nt, synthetic construct
  source 1..22: mol_type = other RNA
ggccctgggctttgccacccta

SEQ ID NO: 7224 - RNA, 22 nt, synthetic construct
  source 1..22: mol_type = other RNA
ggcctacaagaaggggaggcgg

SEQ ID NO: 7225 - RNA, 22 nt, synthetic construct
  source 1..22: mol_type = other RNA
ggcctccttaccattccccttc

SEQ ID NO: 7226 - RNA, 22 nt, synthetic construct
  source 1..22: mol_type = other RNA
ggcctgcatcatcaccgttttt

SEQ ID NO: 7227 - RNA, 22 nt, synthetic construct
  source 1..22: mol_type = other RNA
ggcctggggcagagtggtcagc

SEQ ID NO: 7228 - RNA, 22 nt, synthetic construct
  source 1..22: mol_type = other RNA
ggcctgggtcacctctacggct

SEQ ID NO: 7229 - RNA, 22 nt, synthetic construct
  source 1..22: mol_type = other RNA
ggcctgtgccatctctcgtttc

SEQ ID NO: 7230 - RNA, 22 nt, synthetic construct
  source 1..22: mol_type = other RNA
ggcctgtgccgctttctgtctg

SEQ ID NO: 7231 - RNA, 22 nt, synthetic construct
  source 1..22: mol_type = other RNA
ggccttctccgacggatgtctc

SEQ ID NO: 7232 - RNA, 22 nt, synthetic construct
  source 1..22: mol_type = other RNA
ggcgagaggagggcagcgcaaa

SEQ ID NO: 7233 - RNA, 22 nt, synthetic construct
  source 1..22: mol_type = other RNA
ggcgcagaagccagtagagctc

SEQ ID NO: 7234 - RNA, 22 nt, synthetic construct
  source 1..22: mol_type = other RNA
ggcgctgcaccacgtgatgtcc

SEQ ID NO: 7235 - RNA, 22 nt, synthetic construct
  source 1..22: mol_type = other RNA
ggcggcacagcaagggcactcg

SEQ ID NO: 7236 - RNA, 22 nt, synthetic construct
  source 1..22: mol_type = other RNA
ggcggcagggaaggatctgggc

SEQ ID NO: 7237 - RNA, 22 nt, synthetic construct
  source 1..22: mol_type = other RNA
ggcggcgcagaagccagtagag

SEQ ID NO: 7238 - RNA, 22 nt, synthetic construct
  source 1..22: mol_type = other RNA
ggcgggacgcaagggagacatc

SEQ ID NO: 7239 - RNA, 22 nt, synthetic construct
  source 1..22: mol_type = other RNA
ggctaaagccagggagacgggg

SEQ ID NO: 7240 - RNA, 22 nt, synthetic construct
  source 1..22: mol_type = other RNA
ggctaagcccagggccagttga

SEQ ID NO: 7241 - RNA, 22 nt, synthetic construct
  source 1..22: mol_type = other RNA
ggctcaacatcggaagagggga

SEQ ID NO: 7242 - RNA, 22 nt, synthetic construct
  source 1..22: mol_type = other RNA
ggctcaggttcaggagagggca

SEQ ID NO: 7243 - RNA, 22 nt, synthetic construct
  source 1..22: mol_type = other RNA
ggctccaattcggaagtggggt

SEQ ID NO: 7244 - RNA, 22 nt, synthetic construct
  source 1..22: mol_type = other RNA
ggctgccaaagccagggccagt

SEQ ID NO: 7245 - RNA, 22 nt, synthetic construct
  source 1..22: mol_type = other RNA
ggctggaggggctcaacatcgg

SEQ ID NO: 7246 - RNA, 22 nt, synthetic construct
  source 1..22: mol_type = other RNA
ggctggcccagatccttccctg

SEQ ID NO: 7247 - RNA, 22 nt, synthetic construct
  source 1..22: mol_type = other RNA
ggcttagccactctgtgctgac

SEQ ID NO: 7248 - RNA, 22 nt, synthetic construct
  source 1..22: mol_type = other RNA
ggcttctgcgccgcctctggcc

SEQ ID NO: 7249 - RNA, 22 nt, synthetic construct
  source 1..22: mol_type = other RNA
ggctttagccacctctccatcc

SEQ ID NO: 7250 - RNA, 22 nt, synthetic construct
  source 1..22: mol_type = other RNA
ggctttgccaccctatgctgac

SEQ ID NO: 7251 - RNA, 22 nt, synthetic construct
  source 1..22: mol_type = other RNA
ggctttggcagcctgtgctgac

SEQ ID NO: 7252 - RNA, 22 nt, synthetic construct
  source 1..22: mol_type = other RNA
gggaaacagtgggccagaggcg

SEQ ID NO: 7253 - RNA, 22 nt, synthetic construct
  source 1..22: mol_type = other RNA
gggaacccagcgagtgaagacg

SEQ ID NO: 7254 - RNA, 22 nt, synthetic construct
  source 1..22: mol_type = other RNA
gggaagagggagtggaggaaga

SEQ ID NO: 7255 - RNA, 22 nt, synthetic construct
  source 1..22: mol_type = other RNA
gggaaggagacaaagtccagga

SEQ ID NO: 7256 - RNA, 22 nt, synthetic construct
  source 1..22: mol_type = other RNA
gggaaggatctgggccagccgt

SEQ ID NO: 7257 - RNA, 22 nt, synthetic construct
  source 1..22: mol_type = other RNA
gggaaggggaaacagtgggcca

SEQ ID NO: 7258 - RNA, 22 nt, synthetic construct
  source 1..22: mol_type = other RNA
gggaagtcgagggagggatggt

SEQ ID NO: 7259 - RNA, 22 nt, synthetic construct
  source 1..22: mol_type = other RNA
gggaatggtaaggaggcctggg

SEQ ID NO: 7260 - RNA, 22 nt, synthetic construct
  source 1..22: mol_type = other RNA
gggaatggtaagggggactggg

SEQ ID NO: 7261 - RNA, 22 nt, synthetic construct
  source 1..22: mol_type = other RNA
gggacgcaagggagacatccgt

SEQ ID NO: 7262 - RNA, 22 nt, synthetic construct
  source 1..22: mol_type = other RNA
gggacggggtgtcagcataggg

SEQ ID NO: 7263 - RNA, 22 nt, synthetic construct
  source 1..22: mol_type = other RNA
gggactgggacggggtgtcagc

SEQ ID NO: 7264 - RNA, 22 nt, synthetic construct
  source 1..22: mol_type = other RNA
gggagacatccgtcggagaagg

SEQ ID NO: 7265 - RNA, 22 nt, synthetic construct
  source 1..22: mol_type = other RNA
gggagacggggtactttggggt

SEQ ID NO: 7266 - RNA, 22 nt, synthetic construct
  source 1..22: mol_type = other RNA
gggagagaatgcaggtcagaga

SEQ ID NO: 7267 - RNA, 22 nt, synthetic construct
  source 1..22: mol_type = other RNA
gggagctgcccaaatgaaagga

SEQ ID NO: 7268 - RNA, 22 nt, synthetic construct
  source 1..22: mol_type = other RNA
gggagctggctcaggttcagga

SEQ ID NO: 7269 - RNA, 22 nt, synthetic construct
  source 1..22: mol_type = other RNA
gggaggagagatgcccggagag

SEQ ID NO: 7270 - RNA, 22 nt, synthetic construct
  source 1..22: mol_type = other RNA
gggaggatccgctcagaggaca

SEQ ID NO: 7271 - RNA, 22 nt, synthetic construct
  source 1..22: mol_type = other RNA
gggaggcgggacgcaagggaga

SEQ ID NO: 7272 - RNA, 22 nt, synthetic construct
  source 1..22: mol_type = other RNA
gggagggatggtaaggaggact

SEQ ID NO: 7273 - RNA, 22 nt, synthetic construct
  source 1..22: mol_type = other RNA
gggagtggaggaagacggaacc

SEQ ID NO: 7274 - RNA, 22 nt, synthetic construct
  source 1..22: mol_type = other RNA
gggatggtaaggaggactgcat

SEQ ID NO: 7275 - RNA, 22 nt, synthetic construct
  source 1..22: mol_type = other RNA
gggcactcgggggcgagaggag

SEQ ID NO: 7276 - RNA, 22 nt, synthetic construct
  source 1..22: mol_type = other RNA
gggcagagtggtcagcacagag

SEQ ID NO: 7277 - RNA, 22 nt, synthetic construct
  source 1..22: mol_type = other RNA
gggcagagttccggcggcacag

SEQ ID NO: 7278 - RNA, 22 nt, synthetic construct
  source 1..22: mol_type = other RNA
gggcagcaacacagcagagagc

SEQ ID NO: 7279 - RNA, 22 nt, synthetic construct
  source 1..22: mol_type = other RNA
gggcagcgcaaagtgacaatgg

SEQ ID NO: 7280 - RNA, 22 nt, synthetic construct
  source 1..22: mol_type = other RNA
gggcagctcccctacccccctt

SEQ ID NO: 7281 - RNA, 22 nt, synthetic construct
  source 1..22: mol_type = other RNA
gggcagggaaggagacaaagtc

SEQ ID NO: 7282 - RNA, 22 nt, synthetic construct
  source 1..22: mol_type = other RNA
gggcagggcagggaaggagaca

SEQ ID NO: 7283 - RNA, 22 nt, synthetic construct
  source 1..22: mol_type = other RNA
gggcatctctcctccctcaccc

SEQ ID NO: 7284 - RNA, 22 nt, synthetic construct
  source 1..22: mol_type = other RNA
gggccagaggcggcgcagaagc

SEQ ID NO: 7285 - RNA, 22 nt, synthetic construct
  source 1..22: mol_type = other RNA
gggccagccgtagaggtgaccc

SEQ ID NO: 7286 - RNA, 22 nt, synthetic construct
  source 1..22: mol_type = other RNA
gggccaggcagatagaccagac

SEQ ID NO: 7287 - RNA, 22 nt, synthetic construct
  source 1..22: mol_type = other RNA
gggccagttaaagcgactccaa

SEQ ID NO: 7288 - RNA, 22 nt, synthetic construct
  source 1..22: mol_type = other RNA
gggccagttgaagcggctccaa

SEQ ID NO: 7289 - RNA, 22 nt, synthetic construct
  source 1..22: mol_type = other RNA
gggcctgtgccatctctcgttt

SEQ ID NO: 7290 - RNA, 22 nt, synthetic construct
  source 1..22: mol_type = other RNA
gggcctgtgccgctttctgtct

SEQ ID NO: 7291 - RNA, 22 nt, synthetic construct
  source 1..22: mol_type = other RNA
gggcgagaggagggcagcgcaa

SEQ ID NO: 7292 - RNA, 22 nt, synthetic construct
  source 1..22: mol_type = other RNA
gggctcaacatcggaagagggg

SEQ ID NO: 7293 - RNA, 22 nt, synthetic construct
  source 1..22: mol_type = other RNA
gggcttagccactctgtgctga

SEQ ID NO: 7294 - RNA, 22 nt, synthetic construct
  source 1..22: mol_type = other RNA
gggctttgccaccctatgctga

SEQ ID NO: 7295 - RNA, 22 nt, synthetic construct
  source 1..22: mol_type = other RNA
ggggaaacagtgggccagaggc

SEQ ID NO: 7296 - RNA, 22 nt, synthetic construct
  source 1..22: mol_type = other RNA
ggggaagagggagtggaggaag

SEQ ID NO: 7297 - RNA, 22 nt, synthetic construct
  source 1..22: mol_type = other RNA
ggggaagtcgagggagggatgg

SEQ ID NO: 7298 - RNA, 22 nt, synthetic construct
  source 1..22: mol_type = other RNA
ggggaatggtaaggaggcctgg

SEQ ID NO: 7299 - RNA, 22 nt, synthetic construct
  source 1..22: mol_type = other RNA
ggggaatggtaagggggactgg

SEQ ID NO: 7300 - RNA, 22 nt, synthetic construct
  source 1..22: mol_type = other RNA
ggggactgggacggggtgtcag

SEQ ID NO: 7301 - RNA, 22 nt, synthetic construct
  source 1..22: mol_type = other RNA
ggggagagaatgcaggtcagag

SEQ ID NO: 7302 - RNA, 22 nt, synthetic construct
  source 1..22: mol_type = other RNA
ggggagctgcccaaatgaaagg

SEQ ID NO: 7303 - RNA, 22 nt, synthetic construct
  source 1..22: mol_type = other RNA
ggggaggatccgctcagaggac

SEQ ID NO: 7304 - RNA, 22 nt, synthetic construct
  source 1..22: mol_type = other RNA
ggggaggcgggacgcaagggag

SEQ ID NO: 7305 - RNA, 22 nt, synthetic construct
  source 1..22: mol_type = other RNA
ggggcagagtggtcagcacaga

SEQ ID NO: 7306 - RNA, 22 nt, synthetic construct
  source 1..22: mol_type = other RNA
ggggcctgtgccatctctcgtt

SEQ ID NO: 7307 - RNA, 22 nt, synthetic construct
  source 1..22: mol_type = other RNA
ggggcgagaggagggcagcgca

SEQ ID NO: 7308 - RNA, 22 nt, synthetic construct
  source 1..22: mol_type = other RNA
ggggctcaacatcggaagaggg

SEQ ID NO: 7309 - RNA, 22 nt, synthetic construct
  source 1..22: mol_type = other RNA
gggggactgggacggggtgtca

SEQ ID NO: 7310 - RNA, 22 nt, synthetic construct
  source 1..22: mol_type = other RNA
gggggcgagaggagggcagcgc

SEQ ID NO: 7311 - RNA, 22 nt, synthetic construct
  source 1..22: mol_type = other RNA
ggggggtaggggagctgcccaa

SEQ ID NO: 7312 - RNA, 22 nt, synthetic construct
  source 1..22: mol_type = other RNA
gggggtaggggagctgcccaaa

SEQ ID NO: 7313 - RNA, 22 nt, synthetic construct
  source 1..22: mol_type = other RNA
ggggtactttggggttgtccag

SEQ ID NO: 7314 - RNA, 22 nt, synthetic construct
  source 1..22: mol_type = other RNA
ggggtaggggagctgcccaaat

SEQ ID NO: 7315 - RNA, 22 nt, synthetic construct
  source 1..22: mol_type = other RNA
ggggtggtcgaaggggaatggt

SEQ ID NO: 7316 - RNA, 22 nt, synthetic construct
  source 1..22: mol_type = other RNA
ggggtgtcagcatagggtggca

SEQ ID NO: 7317 - RNA, 22 nt, synthetic construct
  source 1..22: mol_type = other RNA
ggggtgtccaggcaaagaaagc

SEQ ID NO: 7318 - RNA, 22 nt, synthetic construct
  source 1..22: mol_type = other RNA
ggggttgggtgagggaggagag

SEQ ID NO: 7319 - RNA, 22 nt, synthetic construct
  source 1..22: mol_type = other RNA
ggggttgtccagaaaaacggtg

SEQ ID NO: 7320 - RNA, 22 nt, synthetic construct
  source 1..22: mol_type = other RNA
gggtactttggggttgtccaga

SEQ ID NO: 7321 - RNA, 22 nt, synthetic construct
  source 1..22: mol_type = other RNA
gggtaggggagctgcccaaatg

SEQ ID NO: 7322 - RNA, 22 nt, synthetic construct
  source 1..22: mol_type = other RNA
gggtcacctctacggctggccc

SEQ ID NO: 7323 - RNA, 22 nt, synthetic construct
  source 1..22: mol_type = other RNA
gggtcacctctcactcctttca

SEQ ID NO: 7324 - RNA, 22 nt, synthetic construct
  source 1..22: mol_type = other RNA
gggtcagcacaggctgccaaag

SEQ ID NO: 7325 - RNA, 22 nt, synthetic construct
  source 1..22: mol_type = other RNA
gggtcctctccgggcatctctc

SEQ ID NO: 7326 - RNA, 22 nt, synthetic construct
  source 1..22: mol_type = other RNA
gggtgagggaggagagatgccc

SEQ ID NO: 7327 - RNA, 22 nt, synthetic construct
  source 1..22: mol_type = other RNA
gggtggcaaagcccagggccag

SEQ ID NO: 7328 - RNA, 22 nt, synthetic construct
  source 1..22: mol_type = other RNA
gggtggtcgaaggggaatggta

SEQ ID NO: 7329 - RNA, 22 nt, synthetic construct
  source 1..22: mol_type = other RNA
gggtgtcagcatagggtggcaa

SEQ ID NO: 7330 - RNA, 22 nt, synthetic construct
  source 1..22: mol_type = other RNA
gggtgtccaggcaaagaaagca

SEQ ID NO: 7331 - RNA, 22 nt, synthetic construct
  source 1..22: mol_type = other RNA
gggttcccttttccttctcctt

SEQ ID NO: 7332 - RNA, 22 nt, synthetic construct
  source 1..22: mol_type = other RNA
gggttgggtgagggaggagaga

SEQ ID NO: 7333 - RNA, 22 nt, synthetic construct
  source 1..22: mol_type = other RNA
gggttgtccagaaaaacggtga

SEQ ID NO: 7334 - RNA, 22 nt, synthetic construct
  source 1..22: mol_type = other RNA
ggtaaggaggactgcatgggtc

SEQ ID NO: 7335 - RNA, 22 nt, synthetic construct
  source 1..22: mol_type = other RNA
ggtaaggaggcctggggcagag

SEQ ID NO: 7336 - RNA, 22 nt, synthetic construct
  source 1..22: mol_type = other RNA
ggtaagggggactgggacgggg

SEQ ID NO: 7337 - RNA, 22 nt, synthetic construct
  source 1..22: mol_type = other RNA
ggtaaggggggtaggggagctg

SEQ ID NO: 7338 - RNA, 22 nt, synthetic construct
  source 1..22: mol_type = other RNA
ggtactttggggttgtccagaa

SEQ ID NO: 7339 - RNA, 22 nt, synthetic construct
  source 1..22: mol_type = other RNA
ggtaggggagctgcccaaatga

SEQ ID NO: 7340 - RNA, 22 nt, synthetic construct
  source 1..22: mol_type = other RNA
ggtcacctctacggctggccca

SEQ ID NO: 7341 - RNA, 22 nt, synthetic construct
  source 1..22: mol_type = other RNA
ggtcacctctcactcctttcat

SEQ ID NO: 7342 - RNA, 22 nt, synthetic construct
  source 1..22: mol_type = other RNA
ggtcagagaaagcaggacctgc

SEQ ID NO: 7343 - RNA, 22 nt, synthetic construct
  source 1..22: mol_type = other RNA
ggtcagcacagagtggctaagc

SEQ ID NO: 7344 - RNA, 22 nt, synthetic construct
  source 1..22: mol_type = other RNA
ggtcagcacaggctgccaaagc

SEQ ID NO: 7345 - RNA, 22 nt, synthetic construct
  source 1..22: mol_type = other RNA
ggtccggactcaggagagagac

SEQ ID NO: 7346 - RNA, 22 nt, synthetic construct
  source 1..22: mol_type = other RNA
ggtcctctccgggcatctctcc

SEQ ID NO: 7347 - RNA, 22 nt, synthetic construct
  source 1..22: mol_type = other RNA
ggtcctgctttctctgacctgc

SEQ ID NO: 7348 - RNA, 22 nt, synthetic construct
  source 1..22: mol_type = other RNA
ggtcctggactttgtctccttc

SEQ ID NO: 7349 - RNA, 22 nt, synthetic construct
  source 1..22: mol_type = other RNA
ggtcgaaggggaatggtaagga

SEQ ID NO: 7350 - RNA, 22 nt, synthetic construct
  source 1..22: mol_type = other RNA
ggtcgaaggggaatggtaaggg

SEQ ID NO: 7351 - RNA, 22 nt, synthetic construct
  source 1..22: mol_type = other RNA
ggtctatctgcctggccctggc

SEQ ID NO: 7352 - RNA, 22 nt, synthetic construct
  source 1..22: mol_type = other RNA
ggtgacccaggccacaagctgc

SEQ ID NO: 7353 - RNA, 22 nt, synthetic construct
  source 1..22: mol_type = other RNA
ggtgacccgaatccacaggaga

SEQ ID NO: 7354 - RNA, 22 nt, synthetic construct
  source 1..22: mol_type = other RNA
ggtgagggaggagagatgcccg

SEQ ID NO: 7355 - RNA, 22 nt, synthetic construct
  source 1..22: mol_type = other RNA
ggtgatgatgcaggcctacaag

SEQ ID NO: 7356 - RNA, 22 nt, synthetic construct
  source 1..22: mol_type = other RNA
ggtgcagcgccgagaaggaagt

SEQ ID NO: 7357 - RNA, 22 nt, synthetic construct
  source 1..22: mol_type = other RNA
ggtggcaaagcccagggccagg

SEQ ID NO: 7358 - RNA, 22 nt, synthetic construct
  source 1..22: mol_type = other RNA
ggtggctaaagccagggagacg

SEQ ID NO: 7359 - RNA, 22 nt, synthetic construct
  source 1..22: mol_type = other RNA
ggtggtcgaaggggaatggtaa

SEQ ID NO: 7360 - RNA, 22 nt, synthetic construct
  source 1..22: mol_type = other RNA
ggtgtcagcatagggtggcaaa

SEQ ID NO: 7361 - RNA, 22 nt, synthetic construct
  source 1..22: mol_type = other RNA
ggtgtccaggcaaagaaagcaa

SEQ ID NO: 7362 - RNA, 22 nt, synthetic construct
  source 1..22: mol_type = other RNA
ggttcaggagagggcagggcag

SEQ ID NO: 7363 - RNA, 22 nt, synthetic construct
  source 1..22: mol_type = other RNA
ggttcccttttccttctccttc

SEQ ID NO: 7364 - RNA, 22 nt, synthetic construct
  source 1..22: mol_type = other RNA
ggttccgtcttcctccactccc

SEQ ID NO: 7365 - RNA, 22 nt, synthetic construct
  source 1..22: mol_type = other RNA
ggttgggtgagggaggagagat

SEQ ID NO: 7366 - RNA, 22 nt, synthetic construct
  source 1..22: mol_type = other RNA
ggttgtccagaaaaacggtgat

SEQ ID NO: 7367 - RNA, 22 nt, synthetic construct
  source 1..22: mol_type = other RNA
gtaaggaggactgcatgggtca

SEQ ID NO: 7368 - RNA, 22 nt, synthetic construct
  source 1..22: mol_type = other RNA
gtaaggaggcctggggcagagt

SEQ ID NO: 7369 - RNA, 22 nt, synthetic construct
  source 1..22: mol_type = other RNA
gtaagggggactgggacggggt

SEQ ID NO: 7370 - RNA, 22 nt, synthetic construct
  source 1..22: mol_type = other RNA
gtaaggggggtaggggagctgc

SEQ ID NO: 7371 - RNA, 22 nt, synthetic construct
  source 1..22: mol_type = other RNA
gtaccccgtctccctggcttta

SEQ ID NO: 7372 - RNA, 22 nt, synthetic construct
  source 1..22: mol_type = other RNA
gtactttggggttgtccagaaa

SEQ ID NO: 7373 - RNA, 22 nt, synthetic construct
  source 1..22: mol_type = other RNA
gtagagctcaaagtggtccgga

SEQ ID NO: 7374 - RNA, 22 nt, synthetic construct
  source 1..22: mol_type = other RNA
gtagaggtgacccaggccacaa

SEQ ID NO: 7375 - RNA, 22 nt, synthetic construct
  source 1..22: mol_type = other RNA
gtaggcctgcatcatcaccgtt

SEQ ID NO: 7376 - RNA, 22 nt, synthetic construct
  source 1..22: mol_type = other RNA
gtaggggagctgcccaaatgaa

SEQ ID NO: 7377 - RNA, 22 nt, synthetic construct
  source 1..22: mol_type = other RNA
gtaggtcgaaggggaatggtaa

SEQ ID NO: 7378 - RNA, 22 nt, synthetic construct
  source 1..22: mol_type = other RNA
gtcacctctacggctggcccag

SEQ ID NO: 7379 - RNA, 22 nt, synthetic construct
  source 1..22: mol_type = other RNA
gtcacctctcactcctttcatt

SEQ ID NO: 7380 - RNA, 22 nt, synthetic construct
  source 1..22: mol_type = other RNA
gtcactttgcgctgccctcctc

SEQ ID NO: 7381 - RNA, 22 nt, synthetic construct
  source 1..22: mol_type = other RNA
gtcagagaaagcaggacctgcc

SEQ ID NO: 7382 - RNA, 22 nt, synthetic construct
  source 1..22: mol_type = other RNA
gtcagcacagagtggctaagcc

SEQ ID NO: 7383 - RNA, 22 nt, synthetic construct
  source 1..22: mol_type = other RNA
gtcagcacaggctgccaaagcc

SEQ ID NO: 7384 - RNA, 22 nt, synthetic construct
  source 1..22: mol_type = other RNA
gtcagcatagggtggcaaagcc

SEQ ID NO: 7385 - RNA, 22 nt, synthetic construct
  source 1..22: mol_type = other RNA
gtccagaaaaacggtgatgatg

SEQ ID NO: 7386 - RNA, 22 nt, synthetic construct
  source 1..22: mol_type = other RNA
gtccaggaccggctggaggggc

SEQ ID NO: 7387 - RNA, 22 nt, synthetic construct
  source 1..22: mol_type = other RNA
gtccaggcaaagaaagcaagag

SEQ ID NO: 7388 - RNA, 22 nt, synthetic construct
  source 1..22: mol_type = other RNA
gtcccagtcccccttaccattc

SEQ ID NO: 7389 - RNA, 22 nt, synthetic construct
  source 1..22: mol_type = other RNA
gtcccccttaccattccccttc

SEQ ID NO: 7390 - RNA, 22 nt, synthetic construct
  source 1..22: mol_type = other RNA
gtcccgcctccccttcttgtag

SEQ ID NO: 7391 - RNA, 22 nt, synthetic construct
  source 1..22: mol_type = other RNA
gtccggaccactttgagctcta

SEQ ID NO: 7392 - RNA, 22 nt, synthetic construct
  source 1..22: mol_type = other RNA
gtccggactcaggagagagacg

SEQ ID NO: 7393 - RNA, 22 nt, synthetic construct
  source 1..22: mol_type = other RNA
gtcctccttaccatccctccct

SEQ ID NO: 7394 - RNA, 22 nt, synthetic construct
  source 1..22: mol_type = other RNA
gtcctctccgggcatctctcct

SEQ ID NO: 7395 - RNA, 22 nt, synthetic construct
  source 1..22: mol_type = other RNA
gtcctctgagcggatcctcccc

SEQ ID NO: 7396 - RNA, 22 nt, synthetic construct
  source 1..22: mol_type = other RNA
gtcctgctttctctgacctgca

SEQ ID NO: 7397 - RNA, 22 nt, synthetic construct
  source 1..22: mol_type = other RNA
gtcctggactttgtctccttcc

SEQ ID NO: 7398 - RNA, 22 nt, synthetic construct
  source 1..22: mol_type = other RNA
gtcgaaggggaatggtaaggag

SEQ ID NO: 7399 - RNA, 22 nt, synthetic construct
  source 1..22: mol_type = other RNA
gtcgaaggggaatggtaagggg

SEQ ID NO: 7400 - RNA, 22 nt, synthetic construct
  source 1..22: mol_type = other RNA
gtcgagggagggatggtaagga

SEQ ID NO: 7401 - RNA, 22 nt, synthetic construct
  source 1..22: mol_type = other RNA
gtcgctttaactggccctggct

SEQ ID NO: 7402 - RNA, 22 nt, synthetic construct
  source 1..22: mol_type = other RNA
gtcggagaaggccatcctaaga

SEQ ID NO: 7403 - RNA, 22 nt, synthetic construct
  source 1..22: mol_type = other RNA
gtcgttcctggccctgggcttt

SEQ ID NO: 7404 - RNA, 22 nt, synthetic construct
  source 1..22: mol_type = other RNA
gtctatctgcctggccctggcc

SEQ ID NO: 7405 - RNA, 22 nt, synthetic construct
  source 1..22: mol_type = other RNA
gtctccctggctttagccacct

SEQ ID NO: 7406 - RNA, 22 nt, synthetic construct
  source 1..22: mol_type = other RNA
gtctcccttgcgtcccgcctcc

SEQ ID NO: 7407 - RNA, 22 nt, synthetic construct
  source 1..22: mol_type = other RNA
gtctccttccctgccctgccct

SEQ ID NO: 7408 - RNA, 22 nt, synthetic construct
  source 1..22: mol_type = other RNA
gtctctctcctgagtccggacc

SEQ ID NO: 7409 - RNA, 22 nt, synthetic construct
  source 1..22: mol_type = other RNA
gtctgcagcttgtggcctgggt

SEQ ID NO: 7410 - RNA, 22 nt, synthetic construct
  source 1..22: mol_type = other RNA
gtctgggtcctctccgggcatc

SEQ ID NO: 7411 - RNA, 22 nt, synthetic construct
  source 1..22: mol_type = other RNA
gtctggtctatctgcctggccc

SEQ ID NO: 7412 - RNA, 22 nt, synthetic construct
  source 1..22: mol_type = other RNA
gtcttcactcgctgggttccct

SEQ ID NO: 7413 - RNA, 22 nt, synthetic construct
  source 1..22: mol_type = other RNA
gtcttcctccactccctcttcc

SEQ ID NO: 7414 - RNA, 22 nt, synthetic construct
  source 1..22: mol_type = other RNA
gtgaagacggcatggggttggg

SEQ ID NO: 7415 - RNA, 22 nt, synthetic construct
  source 1..22: mol_type = other RNA
gtgacaatggccagggccaggc

SEQ ID NO: 7416 - RNA, 22 nt, synthetic construct
  source 1..22: mol_type = other RNA
gtgacccaggccacaagctgca

SEQ ID NO: 7417 - RNA, 22 nt, synthetic construct
  source 1..22: mol_type = other RNA
gtgacccgaatccacaggagaa

SEQ ID NO: 7418 - RNA, 22 nt, synthetic construct
  source 1..22: mol_type = other RNA
gtgagaggtgacccgaatccac

SEQ ID NO: 7419 - RNA, 22 nt, synthetic construct
  source 1..22: mol_type = other RNA
gtgagggaggagagatgcccgg

SEQ ID NO: 7420 - RNA, 22 nt, synthetic construct
  source 1..22: mol_type = other RNA
gtgatgatgcaggcctacaaga

SEQ ID NO: 7421 - RNA, 22 nt, synthetic construct
  source 1..22: mol_type = other RNA
gtgatgtcctctgagcggatcc

SEQ ID NO: 7422 - RNA, 22 nt, synthetic construct
  source 1..22: mol_type = other RNA
gtgcagcgccgagaaggaagtg

SEQ ID NO: 7423 - RNA, 22 nt, synthetic construct
  source 1..22: mol_type = other RNA
gtgccatctctcgtttcttagg

SEQ ID NO: 7424 - RNA, 22 nt, synthetic construct
  source 1..22: mol_type = other RNA
gtgcccttgctgtgccgccgga

SEQ ID NO: 7425 - RNA, 22 nt, synthetic construct
  source 1..22: mol_type = other RNA
gtgccgccggaactctgccctc

SEQ ID NO: 7426 - RNA, 22 nt, synthetic construct
  source 1..22: mol_type = other RNA
gtgccgctttctgtctgcagct

SEQ ID NO: 7427 - RNA, 22 nt, synthetic construct
  source 1..22: mol_type = other RNA
gtgctccggaaagagcatcctt

SEQ ID NO: 7428 - RNA, 22 nt, synthetic construct
  source 1..22: mol_type = other RNA
gtgctgaccactctgccccagg

SEQ ID NO: 7429 - RNA, 22 nt, synthetic construct
  source 1..22: mol_type = other RNA
gtgctgacccatgcagtcctcc

SEQ ID NO: 7430 - RNA, 22 nt, synthetic construct
  source 1..22: mol_type = other RNA
gtggaggaagacggaacctgaa

SEQ ID NO: 7431 - RNA, 22 nt, synthetic construct
  source 1..22: mol_type = other RNA
gtggattcgggtcacctctcac

SEQ ID NO: 7432 - RNA, 22 nt, synthetic construct
  source 1..22: mol_type = other RNA
gtggcaaagcccagggccagga

SEQ ID NO: 7433 - RNA, 22 nt, synthetic construct
  source 1..22: mol_type = other RNA
gtggcctgggtcacctctacgg

SEQ ID NO: 7434 - RNA, 22 nt, synthetic construct
  source 1..22: mol_type = other RNA
gtggctaaagccagggagacgg

SEQ ID NO: 7435 - RNA, 22 nt, synthetic construct
  source 1..22: mol_type = other RNA
gtggctaagcccagggccagtt

SEQ ID NO: 7436 - RNA, 22 nt, synthetic construct
  source 1..22: mol_type = other RNA
gtgggccagaggcggcgcagaa

SEQ ID NO: 7437 - RNA, 22 nt, synthetic construct
  source 1..22: mol_type = other RNA
gtggggtggtcgaaggggaatg

SEQ ID NO: 7438 - RNA, 22 nt, synthetic construct
  source 1..22: mol_type = other RNA
gtggtcagcacagagtggctaa

SEQ ID NO: 7439 - RNA, 22 nt, synthetic construct
  source 1..22: mol_type = other RNA
gtggtccggactcaggagagag

SEQ ID NO: 7440 - RNA, 22 nt, synthetic construct
  source 1..22: mol_type = other RNA
gtggtcgaaggggaatggtaag

SEQ ID NO: 7441 - RNA, 22 nt, synthetic construct
  source 1..22: mol_type = other RNA
gtggtgcagcgccgagaaggaa

SEQ ID NO: 7442 - RNA, 22 nt, synthetic construct
  source 1..22: mol_type = other RNA
gtgtcagcatagggtggcaaag

SEQ ID NO: 7443 - RNA, 22 nt, synthetic construct
  source 1..22: mol_type = other RNA
gtgtccaggcaaagaaagcaag

SEQ ID NO: 7444 - RNA, 22 nt, synthetic construct
  source 1..22: mol_type = other RNA
gtgtctgggtcctctccgggca

SEQ ID NO: 7445 - RNA, 22 nt, synthetic construct
  source 1..22: mol_type = other RNA
gtgttgctgcccaaggatgctc

SEQ ID NO: 7446 - RNA, 22 nt, synthetic construct
  source 1..22: mol_type = other RNA
gttaaagcgactccaatgcgga

SEQ ID NO: 7447 - RNA, 22 nt, synthetic construct
  source 1..22: mol_type = other RNA
gttagagggcagagttccggcg

SEQ ID NO: 7448 - RNA, 22 nt, synthetic construct
  source 1..22: mol_type = other RNA
gttcaggagagggcagggcagg

SEQ ID NO: 7449 - RNA, 22 nt, synthetic construct
  source 1..22: mol_type = other RNA
gttcccttttccttctccttct

SEQ ID NO: 7450 - RNA, 22 nt, synthetic construct
  source 1..22: mol_type = other RNA
gttccggcggcacagcaagggc

SEQ ID NO: 7451 - RNA, 22 nt, synthetic construct
  source 1..22: mol_type = other RNA
gttccgtcttcctccactccct

SEQ ID NO: 7452 - RNA, 22 nt, synthetic construct
  source 1..22: mol_type = other RNA
gttcctggccctgggctttgcc

SEQ ID NO: 7453 - RNA, 22 nt, synthetic construct
  source 1..22: mol_type = other RNA
gttctcctgtggattcgggtca

SEQ ID NO: 7454 - RNA, 22 nt, synthetic construct
  source 1..22: mol_type = other RNA
gttgaagcggctccaattcgga

SEQ ID NO: 7455 - RNA, 22 nt, synthetic construct
  source 1..22: mol_type = other RNA
gttgagcccctccagccggtcc

SEQ ID NO: 7456 - RNA, 22 nt, synthetic construct
  source 1..22: mol_type = other RNA
gttgctgcccaaggatgctctt

SEQ ID NO: 7457 - RNA, 22 nt, synthetic construct
  source 1..22: mol_type = other RNA
gttgggtgagggaggagagatg

SEQ ID NO: 7458 - RNA, 22 nt, synthetic construct
  source 1..22: mol_type = other RNA
gttgtccagaaaaacggtgatg

SEQ ID NO: 7459 - RNA, 22 nt, synthetic construct
  source 1..22: mol_type = other RNA
gtttccccttcccaggcaggtc

SEQ ID NO: 7460 - RNA, 22 nt, synthetic construct
  source 1..22: mol_type = other RNA
gtttcttaggatggccttctcc

SEQ ID NO: 7461 - RNA, 22 nt, synthetic construct
  source 1..22: mol_type = other RNA
gtttttctggacaaccccaaag

SEQ ID NO: 7462 - RNA, 22 nt, synthetic construct
  source 1..22: mol_type = other RNA
taaagccagggagacggggtac

SEQ ID NO: 7463 - RNA, 22 nt, synthetic construct
  source 1..22: mol_type = other RNA
taaagcgactccaatgcggaag

SEQ ID NO: 7464 - RNA, 22 nt, synthetic construct
  source 1..22: mol_type = other RNA
taacgctgccgtctctctcctg

SEQ ID NO: 7465 - RNA, 22 nt, synthetic construct
  source 1..22: mol_type = other RNA
taactggccctggctttggcag

SEQ ID NO: 7466 - RNA, 22 nt, synthetic construct
  source 1..22: mol_type = other RNA
taagaaacgagagatggcacag

SEQ ID NO: 7467 - RNA, 22 nt, synthetic construct
  source 1..22: mol_type = other RNA
taagcccagggccagttgaagc

SEQ ID NO: 7468 - RNA, 22 nt, synthetic construct
  source 1..22: mol_type = other RNA
taaggaggactgcatgggtcag

SEQ ID NO: 7469 - RNA, 22 nt, synthetic construct
  source 1..22: mol_type = other RNA
taaggaggcctggggcagagtg

SEQ ID NO: 7470 - RNA, 22 nt, synthetic construct
  source 1..22: mol_type = other RNA
taagggggactgggacggggtg

SEQ ID NO: 7471 - RNA, 22 nt, synthetic construct
  source 1..22: mol_type = other RNA
taaggggggtaggggagctgcc

SEQ ID NO: 7472 - RNA, 22 nt, synthetic construct
  source 1..22: mol_type = other RNA
tacaagaaggggaggcgggacg

SEQ ID NO: 7473 - RNA, 22 nt, synthetic construct
  source 1..22: mol_type = other RNA
taccatccctccctcgacttcc

SEQ ID NO: 7474 - RNA, 22 nt, synthetic construct
  source 1..22: mol_type = other RNA
taccattccccttcgaccaccc

SEQ ID NO: 7475 - RNA, 22 nt, synthetic construct
  source 1..22: mol_type = other RNA
taccattccccttcgacctact

SEQ ID NO: 7476 - RNA, 22 nt, synthetic construct
  source 1..22: mol_type = other RNA
taccccccttacctctctagtc

SEQ ID NO: 7477 - RNA, 22 nt, synthetic construct
  source 1..22: mol_type = other RNA
taccccgtctccctggctttag

SEQ ID NO: 7478 - RNA, 22 nt, synthetic construct
  source 1..22: mol_type = other RNA
tacggctggcccagatccttcc

SEQ ID NO: 7479 - RNA, 22 nt, synthetic construct
  source 1..22: mol_type = other RNA
tactctcttccgcattggagtc

SEQ ID NO: 7480 - RNA, 22 nt, synthetic construct
  source 1..22: mol_type = other RNA
tactggcttctgcgccgcctct

SEQ ID NO: 7481 - RNA, 22 nt, synthetic construct
  source 1..22: mol_type = other RNA
tactttggggttgtccagaaaa

SEQ ID NO: 7482 - RNA, 22 nt, synthetic construct
  source 1..22: mol_type = other RNA
tagaccagactgagctatggga

SEQ ID NO: 7483 - RNA, 22 nt, synthetic construct
  source 1..22: mol_type = other RNA
tagagaggtaaggggggtaggg

SEQ ID NO: 7484 - RNA, 22 nt, synthetic construct
  source 1..22: mol_type = other RNA
tagagctcaaagtggtccggac

SEQ ID NO: 7485 - RNA, 22 nt, synthetic construct
  source 1..22: mol_type = other RNA
tagagggcagagttccggcggc

SEQ ID NO: 7486 - RNA, 22 nt, synthetic construct
  source 1..22: mol_type = other RNA
tagaggtgacccaggccacaag

SEQ ID NO: 7487 - RNA, 22 nt, synthetic construct
  source 1..22: mol_type = other RNA
tagcacagactagagaggtaag

SEQ ID NO: 7488 - RNA, 22 nt, synthetic construct
  source 1..22: mol_type = other RNA
tagccacctctccatcctcttg

SEQ ID NO: 7489 - RNA, 22 nt, synthetic construct
  source 1..22: mol_type = other RNA
tagccactctgtgctgaccact

SEQ ID NO: 7490 - RNA, 22 nt, synthetic construct
  source 1..22: mol_type = other RNA
tagctcagtctggtctatctgc

SEQ ID NO: 7491 - RNA, 22 nt, synthetic construct
  source 1..22: mol_type = other RNA
taggatggccttctccgacgga

SEQ ID NO: 7492 - RNA, 22 nt, synthetic construct
  source 1..22: mol_type = other RNA
taggcctgcatcatcaccgttt

SEQ ID NO: 7493 - RNA, 22 nt, synthetic construct
  source 1..22: mol_type = other RNA
taggggagctgcccaaatgaaa

SEQ ID NO: 7494 - RNA, 22 nt, synthetic construct
  source 1..22: mol_type = other RNA
tagggtggcaaagcccagggcc

SEQ ID NO: 7495 - RNA, 22 nt, synthetic construct
  source 1..22: mol_type = other RNA
taggtcgaaggggaatggtaag

SEQ ID NO: 7496 - RNA, 22 nt, synthetic construct
  source 1..22: mol_type = other RNA
tatctgcctggccctggccatt

SEQ ID NO: 7497 - RNA, 22 nt, synthetic construct
  source 1..22: mol_type = other RNA
tatgctgacaccccgtcccagt

SEQ ID NO: 7498 - RNA, 22 nt, synthetic construct
  source 1..22: mol_type = other RNA
tatgggagctggctcaggttca

SEQ ID NO: 7499 - RNA, 22 nt, synthetic construct
  source 1..22: mol_type = other RNA
tcaaagtggtccggactcagga

SEQ ID NO: 7500 - RNA, 22 nt, synthetic construct
  source 1..22: mol_type = other RNA
tcaacatcggaagaggggaagt

SEQ ID NO: 7501 - RNA, 22 nt, synthetic construct
  source 1..22: mol_type = other RNA
tcaactggccctgggcttagcc

SEQ ID NO: 7502 - RNA, 22 nt, synthetic construct
  source 1..22: mol_type = other RNA
tcacccaaccccatgccgtctt

SEQ ID NO: 7503 - RNA, 22 nt, synthetic construct
  source 1..22: mol_type = other RNA
tcaccgtttttctggacaaccc

SEQ ID NO: 7504 - RNA, 22 nt, synthetic construct
  source 1..22: mol_type = other RNA
tcacctctacggctggcccaga

SEQ ID NO: 7505 - RNA, 22 nt, synthetic construct
  source 1..22: mol_type = other RNA
tcacctctcactcctttcattt

SEQ ID NO: 7506 - RNA, 22 nt, synthetic construct
  source 1..22: mol_type = other RNA
tcacgtggtgcagcgccgagaa

SEQ ID NO: 7507 - RNA, 22 nt, synthetic construct
  source 1..22: mol_type = other RNA
tcactcctttcatttgggcagc

SEQ ID NO: 7508 - RNA, 22 nt, synthetic construct
  source 1..22: mol_type = other RNA
tcactcgctgggttcccttttc

SEQ ID NO: 7509 - RNA, 22 nt, synthetic construct
  source 1..22: mol_type = other RNA
tcactttgcgctgccctcctct

SEQ ID NO: 7510 - RNA, 22 nt, synthetic construct
  source 1..22: mol_type = other RNA
tcagagaaagcaggacctgcct

SEQ ID NO: 7511 - RNA, 22 nt, synthetic construct
  source 1..22: mol_type = other RNA
tcagaggacatcacgtggtgca

SEQ ID NO: 7512 - RNA, 22 nt, synthetic construct
  source 1..22: mol_type = other RNA
tcagcacagagtggctaagccc

SEQ ID NO: 7513 - RNA, 22 nt, synthetic construct
  source 1..22: mol_type = other RNA
tcagcacaggctgccaaagcca

SEQ ID NO: 7514 - RNA, 22 nt, synthetic construct
  source 1..22: mol_type = other RNA
tcagcatagggtggcaaagccc

SEQ ID NO: 7515 - RNA, 22 nt, synthetic construct
  source 1..22: mol_type = other RNA
tcaggagagagacggcagcgtt

SEQ ID NO: 7516 - RNA, 22 nt, synthetic construct
  source 1..22: mol_type = other RNA
tcaggagagggcagggcaggga

SEQ ID NO: 7517 - RNA, 22 nt, synthetic construct
  source 1..22: mol_type = other RNA
tcaggttcaggagagggcaggg

SEQ ID NO: 7518 - RNA, 22 nt, synthetic construct
  source 1..22: mol_type = other RNA
tcaggttccgtcttcctccact

SEQ ID NO: 7519 - RNA, 22 nt, synthetic construct
  source 1..22: mol_type = other RNA
tcagtctggtctatctgcctgg

SEQ ID NO: 7520 - RNA, 22 nt, synthetic construct
  source 1..22: mol_type = other RNA
tcatcaccgtttttctggacaa

SEQ ID NO: 7521 - RNA, 22 nt, synthetic construct
  source 1..22: mol_type = other RNA
tcatttgggcagctcccctacc

SEQ ID NO: 7522 - RNA, 22 nt, synthetic construct
  source 1..22: mol_type = other RNA
tccaatgcggaagagagtaggt

SEQ ID NO: 7523 - RNA, 22 nt, synthetic construct
  source 1..22: mol_type = other RNA
tccaattcggaagtggggtggt

SEQ ID NO: 7524 - RNA, 22 nt, synthetic construct
  source 1..22: mol_type = other RNA
tccacaggagaacggggtgtcc

SEQ ID NO: 7525 - RNA, 22 nt, synthetic construct
  source 1..22: mol_type = other RNA
tccactccctcttccccttgct

SEQ ID NO: 7526 - RNA, 22 nt, synthetic construct
  source 1..22: mol_type = other RNA
tccagaaaaacggtgatgatgc

SEQ ID NO: 7527 - RNA, 22 nt, synthetic construct
  source 1..22: mol_type = other RNA
tccagccggtcctggactttgt

SEQ ID NO: 7528 - RNA, 22 nt, synthetic construct
  source 1..22: mol_type = other RNA
tccaggaccggctggaggggct

SEQ ID NO: 7529 - RNA, 22 nt, synthetic construct
  source 1..22: mol_type = other RNA
tccaggcaaagaaagcaagagg

SEQ ID NO: 7530 - RNA, 22 nt, synthetic construct
  source 1..22: mol_type = other RNA
tccatcctcttgctttctttgc

SEQ ID NO: 7531 - RNA, 22 nt, synthetic construct
  source 1..22: mol_type = other RNA
tcccaggcaggtcctgctttct

SEQ ID NO: 7532 - RNA, 22 nt, synthetic construct
  source 1..22: mol_type = other RNA
tcccagtcccccttaccattcc

SEQ ID NO: 7533 - RNA, 22 nt, synthetic construct
  source 1..22: mol_type = other RNA
tcccatagctcagtctggtcta

SEQ ID NO: 7534 - RNA, 22 nt, synthetic construct
  source 1..22: mol_type = other RNA
tcccccttaccattccccttcg

SEQ ID NO: 7535 - RNA, 22 nt, synthetic construct
  source 1..22: mol_type = other RNA
tccccgtgtctgggtcctctcc

SEQ ID NO: 7536 - RNA, 22 nt, synthetic construct
  source 1..22: mol_type = other RNA
tcccctaccccccttacctctc

SEQ ID NO: 7537 - RNA, 22 nt, synthetic construct
  source 1..22: mol_type = other RNA
tcccctcttccgatgttgagcc

SEQ ID NO: 7538 - RNA, 22 nt, synthetic construct
  source 1..22: mol_type = other RNA
tcccctgggcctgtgccgcttt

SEQ ID NO: 7539 - RNA, 22 nt, synthetic construct
  source 1..22: mol_type = other RNA
tccccttcccaggcaggtcctg

SEQ ID NO: 7540 - RNA, 22 nt, synthetic construct
  source 1..22: mol_type = other RNA
tccccttcgaccaccccacttc

SEQ ID NO: 7541 - RNA, 22 nt, synthetic construct
  source 1..22: mol_type = other RNA
tccccttcgacctactctcttc

SEQ ID NO: 7542 - RNA, 22 nt, synthetic construct
  source 1..22: mol_type = other RNA
tccccttcttgtaggcctgcat

SEQ ID NO: 7543 - RNA, 22 nt, synthetic construct
  source 1..22: mol_type = other RNA
tccccttgctctctgctgtgtt

SEQ ID NO: 7544 - RNA, 22 nt, synthetic construct
  source 1..22: mol_type = other RNA
tcccgcctccccttcttgtagg

SEQ ID NO: 7545 - RNA, 22 nt, synthetic construct
  source 1..22: mol_type = other RNA
tccctcacccaaccccatgccg

SEQ ID NO: 7546 - RNA, 22 nt, synthetic construct
  source 1..22: mol_type = other RNA
tccctccctcgacttcccctct

SEQ ID NO: 7547 - RNA, 22 nt, synthetic construct
  source 1..22: mol_type = other RNA
tccctcgacttcccctcttccg

SEQ ID NO: 7548 - RNA, 22 nt, synthetic construct
  source 1..22: mol_type = other RNA
tccctcttccccttgctctctg

SEQ ID NO: 7549 - RNA, 22 nt, synthetic construct
  source 1..22: mol_type = other RNA
tccctgccctgccctctcctga

SEQ ID NO: 7550 - RNA, 22 nt, synthetic construct
  source 1..22: mol_type = other RNA
tccctgccgcctccttcaggtt

SEQ ID NO: 7551 - RNA, 22 nt, synthetic construct
  source 1..22: mol_type = other RNA
tccctggctttagccacctctc

SEQ ID NO: 7552 - RNA, 22 nt, synthetic construct
  source 1..22: mol_type = other RNA
tcccttgcgtcccgcctcccct

SEQ ID NO: 7553 - RNA, 22 nt, synthetic construct
  source 1..22: mol_type = other RNA
tcccttttccttctccttctgg

SEQ ID NO: 7554 - RNA, 22 nt, synthetic construct
  source 1..22: mol_type = other RNA
tccgaattggagccgcttcaac

SEQ ID NO: 7555 - RNA, 22 nt, synthetic construct
  source 1..22: mol_type = other RNA
tccgacggatgtctcccttgcg

SEQ ID NO: 7556 - RNA, 22 nt, synthetic construct
  source 1..22: mol_type = other RNA
tccgatgttgagcccctccagc

SEQ ID NO: 7557 - RNA, 22 nt, synthetic construct
  source 1..22: mol_type = other RNA
tccgcattggagtcgctttaac

SEQ ID NO: 7558 - RNA, 22 nt, synthetic construct
  source 1..22: mol_type = other RNA
tccgctcagaggacatcacgtg

SEQ ID NO: 7559 - RNA, 22 nt, synthetic construct
  source 1..22: mol_type = other RNA
tccggaaagagcatccttgggc

SEQ ID NO: 7560 - RNA, 22 nt, synthetic construct
  source 1..22: mol_type = other RNA
tccggaccactttgagctctac

SEQ ID NO: 7561 - RNA, 22 nt, synthetic construct
  source 1..22: mol_type = other RNA
tccggactcaggagagagacgg

SEQ ID NO: 7562 - RNA, 22 nt, synthetic construct
  source 1..22: mol_type = other RNA
tccggagcacttccttctcggc

SEQ ID NO: 7563 - RNA, 22 nt, synthetic construct
  source 1..22: mol_type = other RNA
tccggcggcacagcaagggcac

SEQ ID NO: 7564 - RNA, 22 nt, synthetic construct
  source 1..22: mol_type = other RNA
tccgggcatctctcctccctca

SEQ ID NO: 7565 - RNA, 22 nt, synthetic construct
  source 1..22: mol_type = other RNA
tccgtcggagaaggccatccta

SEQ ID NO: 7566 - RNA, 22 nt, synthetic construct
  source 1..22: mol_type = other RNA
tccgtcttcctccactccctct

SEQ ID NO: 7567 - RNA, 22 nt, synthetic construct
  source 1..22: mol_type = other RNA
tcctaagaaacgagagatggca

SEQ ID NO: 7568 - RNA, 22 nt, synthetic construct
  source 1..22: mol_type = other RNA
tcctccactccctcttcccctt

SEQ ID NO: 7569 - RNA, 22 nt, synthetic construct
  source 1..22: mol_type = other RNA
tcctccccgtgtctgggtcctc

SEQ ID NO: 7570 - RNA, 22 nt, synthetic construct
  source 1..22: mol_type = other RNA
tcctccctcacccaaccccatg

SEQ ID NO: 7571 - RNA, 22 nt, synthetic construct
  source 1..22: mol_type = other RNA
tcctccttaccatccctccctc

SEQ ID NO: 7572 - RNA, 22 nt, synthetic construct
  source 1..22: mol_type = other RNA
tcctctccgggcatctctcctc

SEQ ID NO: 7573 - RNA, 22 nt, synthetic construct
  source 1..22: mol_type = other RNA
tcctctcgcccccgagtgccct

SEQ ID NO: 7574 - RNA, 22 nt, synthetic construct
  source 1..22: mol_type = other RNA
tcctctgagcggatcctccccg

SEQ ID NO: 7575 - RNA, 22 nt, synthetic construct
  source 1..22: mol_type = other RNA
tcctcttgctttctttgcctgg

SEQ ID NO: 7576 - RNA, 22 nt, synthetic construct
  source 1..22: mol_type = other RNA
tcctgaacctgagccagctccc

SEQ ID NO: 7577 - RNA, 22 nt, synthetic construct
  source 1..22: mol_type = other RNA
tcctgagtccggaccactttga

SEQ ID NO: 7578 - RNA, 22 nt, synthetic construct
  source 1..22: mol_type = other RNA
tcctgctttctctgacctgcat

SEQ ID NO: 7579 - RNA, 22 nt, synthetic construct
  source 1..22: mol_type = other RNA
tcctggactttgtctccttccc

SEQ ID NO: 7580 - RNA, 22 nt, synthetic construct
  source 1..22: mol_type = other RNA
tcctggccctgggctttgccac

SEQ ID NO: 7581 - RNA, 22 nt, synthetic construct
  source 1..22: mol_type = other RNA
tcctgtggattcgggtcacctc

SEQ ID NO: 7582 - RNA, 22 nt, synthetic construct
  source 1..22: mol_type = other RNA
tccttaccatccctccctcgac

SEQ ID NO: 7583 - RNA, 22 nt, synthetic construct
  source 1..22: mol_type = other RNA
tccttaccattccccttcgacc

SEQ ID NO: 7584 - RNA, 22 nt, synthetic construct
  source 1..22: mol_type = other RNA
tccttcaggttccgtcttcctc

SEQ ID NO: 7585 - RNA, 22 nt, synthetic construct
  source 1..22: mol_type = other RNA
tccttccctgccctgccctctc

SEQ ID NO: 7586 - RNA, 22 nt, synthetic construct
  source 1..22: mol_type = other RNA
tccttccctgccgcctccttca

SEQ ID NO: 7587 - RNA, 22 nt, synthetic construct
  source 1..22: mol_type = other RNA
tccttctccttctggggcctgt

SEQ ID NO: 7588 - RNA, 22 nt, synthetic construct
  source 1..22: mol_type = other RNA
tccttctcggcgctgcaccacg

SEQ ID NO: 7589 - RNA, 22 nt, synthetic construct
  source 1..22: mol_type = other RNA
tccttctggggcctgtgccatc

SEQ ID NO: 7590 - RNA, 22 nt, synthetic construct
  source 1..22: mol_type = other RNA
tccttgggcagcaacacagcag

SEQ ID NO: 7591 - RNA, 22 nt, synthetic construct
  source 1..22: mol_type = other RNA
tcctttcatttgggcagctccc

SEQ ID NO: 7592 - RNA, 22 nt, synthetic construct
  source 1..22: mol_type = other RNA
tcgaaggggaatggtaaggagg

SEQ ID NO: 7593 - RNA, 22 nt, synthetic construct
  source 1..22: mol_type = other RNA
tcgaaggggaatggtaaggggg

SEQ ID NO: 7594 - RNA, 22 nt, synthetic construct
  source 1..22: mol_type = other RNA
tcgaccaccccacttccgaatt

SEQ ID NO: 7595 - RNA, 22 nt, synthetic construct
  source 1..22: mol_type = other RNA
tcgacctactctcttccgcatt

SEQ ID NO: 7596 - RNA, 22 nt, synthetic construct
  source 1..22: mol_type = other RNA
tcgacttcccctcttccgatgt

SEQ ID NO: 7597 - RNA, 22 nt, synthetic construct
  source 1..22: mol_type = other RNA
tcgagggagggatggtaaggag

SEQ ID NO: 7598 - RNA, 22 nt, synthetic construct
  source 1..22: mol_type = other RNA
tcgcccccgagtgcccttgctg

SEQ ID NO: 7599 - RNA, 22 nt, synthetic construct
  source 1..22: mol_type = other RNA
tcgctgggttcccttttccttc

SEQ ID NO: 7600 - RNA, 22 nt, synthetic construct
  source 1..22: mol_type = other RNA
tcgctttaactggccctggctt

SEQ ID NO: 7601 - RNA, 22 nt, synthetic construct
  source 1..22: mol_type = other RNA
tcggaagaggggaagtcgaggg

SEQ ID NO: 7602 - RNA, 22 nt, synthetic construct
  source 1..22: mol_type = other RNA
tcggaagtggggtggtcgaagg

SEQ ID NO: 7603 - RNA, 22 nt, synthetic construct
  source 1..22: mol_type = other RNA
tcggagaaggccatcctaagaa

SEQ ID NO: 7604 - RNA, 22 nt, synthetic construct
  source 1..22: mol_type = other RNA
tcggcgctgcaccacgtgatgt

SEQ ID NO: 7605 - RNA, 22 nt, synthetic construct
  source 1..22: mol_type = other RNA
tcgggggcgagaggagggcagc

SEQ ID NO: 7606 - RNA, 22 nt, synthetic construct
  source 1..22: mol_type = other RNA
tcgggtcacctctcactccttt

SEQ ID NO: 7607 - RNA, 22 nt, synthetic construct
  source 1..22: mol_type = other RNA
tcgttcctggccctgggctttg

SEQ ID NO: 7608 - RNA, 22 nt, synthetic construct
  source 1..22: mol_type = other RNA
tcgtttcttaggatggccttct

SEQ ID NO: 7609 - RNA, 22 nt, synthetic construct
  source 1..22: mol_type = other RNA
tctaacgctgccgtctctctcc

SEQ ID NO: 7610 - RNA, 22 nt, synthetic construct
  source 1..22: mol_type = other RNA
tctacggctggcccagatcctt

SEQ ID NO: 7611 - RNA, 22 nt, synthetic construct
  source 1..22: mol_type = other RNA
tctactggcttctgcgccgcct

SEQ ID NO: 7612 - RNA, 22 nt, synthetic construct
  source 1..22: mol_type = other RNA
tctatctgcctggccctggcca

SEQ ID NO: 7613 - RNA, 22 nt, synthetic construct
  source 1..22: mol_type = other RNA
tctcactcctttcatttgggca

SEQ ID NO: 7614 - RNA, 22 nt, synthetic construct
  source 1..22: mol_type = other RNA
tctccatcctcttgctttcttt

SEQ ID NO: 7615 - RNA, 22 nt, synthetic construct
  source 1..22: mol_type = other RNA
tctcccctgggcctgtgccgct

SEQ ID NO: 7616 - RNA, 22 nt, synthetic construct
  source 1..22: mol_type = other RNA
tctccctggctttagccacctc

SEQ ID NO: 7617 - RNA, 22 nt, synthetic construct
  source 1..22: mol_type = other RNA
tctcccttgcgtcccgcctccc

SEQ ID NO: 7618 - RNA, 22 nt, synthetic construct
  source 1..22: mol_type = other RNA
tctccgacggatgtctcccttg

SEQ ID NO: 7619 - RNA, 22 nt, synthetic construct
  source 1..22: mol_type = other RNA
tctccgggcatctctcctccct

SEQ ID NO: 7620 - RNA, 22 nt, synthetic construct
  source 1..22: mol_type = other RNA
tctcctccctcacccaacccca

SEQ ID NO: 7621 - RNA, 22 nt, synthetic construct
  source 1..22: mol_type = other RNA
tctcctgaacctgagccagctc

SEQ ID NO: 7622 - RNA, 22 nt, synthetic construct
  source 1..22: mol_type = other RNA
tctcctgagtccggaccacttt

SEQ ID NO: 7623 - RNA, 22 nt, synthetic construct
  source 1..22: mol_type = other RNA
tctcctgtggattcgggtcacc

SEQ ID NO: 7624 - RNA, 22 nt, synthetic construct
  source 1..22: mol_type = other RNA
tctccttccctgccctgccctc

SEQ ID NO: 7625 - RNA, 22 nt, synthetic construct
  source 1..22: mol_type = other RNA
tctccttctggggcctgtgcca

SEQ ID NO: 7626 - RNA, 22 nt, synthetic construct
  source 1..22: mol_type = other RNA
tctcgcccccgagtgcccttgc

SEQ ID NO: 7627 - RNA, 22 nt, synthetic construct
  source 1..22: mol_type = other RNA
tctcggcgctgcaccacgtgat

SEQ ID NO: 7628 - RNA, 22 nt, synthetic construct
  source 1..22: mol_type = other RNA
tctcgtttcttaggatggcctt

SEQ ID NO: 7629 - RNA, 22 nt, synthetic construct
  source 1..22: mol_type = other RNA
tctctcccctgggcctgtgccg

SEQ ID NO: 7630 - RNA, 22 nt, synthetic construct
  source 1..22: mol_type = other RNA
tctctcctccctcacccaaccc

SEQ ID NO: 7631 - RNA, 22 nt, synthetic construct
  source 1..22: mol_type = other RNA
tctctcctgagtccggaccact

SEQ ID NO: 7632 - RNA, 22 nt, synthetic construct
  source 1..22: mol_type = other RNA
tctctcgtttcttaggatggcc

SEQ ID NO: 7633 - RNA, 22 nt, synthetic construct
  source 1..22: mol_type = other RNA
tctctctcctgagtccggacca

SEQ ID NO: 7634 - RNA, 22 nt, synthetic construct
  source 1..22: mol_type = other RNA
tctctgacctgcattctctccc

SEQ ID NO: 7635 - RNA, 22 nt, synthetic construct
  source 1..22: mol_type = other RNA
tctctgctgtgttgctgcccaa

SEQ ID NO: 7636 - RNA, 22 nt, synthetic construct
  source 1..22: mol_type = other RNA
tctcttccgcattggagtcgct

SEQ ID NO: 7637 - RNA, 22 nt, synthetic construct
  source 1..22: mol_type = other RNA
tctgacctgcattctctcccct

SEQ ID NO: 7638 - RNA, 22 nt, synthetic construct
  source 1..22: mol_type = other RNA
tctgagcggatcctccccgtgt

SEQ ID NO: 7639 - RNA, 22 nt, synthetic construct
  source 1..22: mol_type = other RNA
tctgcagcttgtggcctgggtc

SEQ ID NO: 7640 - RNA, 22 nt, synthetic construct
  source 1..22: mol_type = other RNA
tctgccccaggcctccttacca

SEQ ID NO: 7641 - RNA, 22 nt, synthetic construct
  source 1..22: mol_type = other RNA
tctgccctctaacgctgccgtc

SEQ ID NO: 7642 - RNA, 22 nt, synthetic construct
  source 1..22: mol_type = other RNA
tctgcctggccctggccattgt

SEQ ID NO: 7643 - RNA, 22 nt, synthetic construct
  source 1..22: mol_type = other RNA
tctgcgccgcctctggcccact

SEQ ID NO: 7644 - RNA, 22 nt, synthetic construct
  source 1..22: mol_type = other RNA
tctgctgtgttgctgcccaagg

SEQ ID NO: 7645 - RNA, 22 nt, synthetic construct
  source 1..22: mol_type = other RNA
tctggacaaccccaaagtaccc

SEQ ID NO: 7646 - RNA, 22 nt, synthetic construct
  source 1..22: mol_type = other RNA
tctggcccactgtttccccttc

SEQ ID NO: 7647 - RNA, 22 nt, synthetic construct
  source 1..22: mol_type = other RNA
tctgggccagccgtagaggtga

SEQ ID NO: 7648 - RNA, 22 nt, synthetic construct
  source 1..22: mol_type = other RNA
tctggggcctgtgccatctctc

SEQ ID NO: 7649 - RNA, 22 nt, synthetic construct
  source 1..22: mol_type = other RNA
tctgggtcctctccgggcatct

SEQ ID NO: 7650 - RNA, 22 nt, synthetic construct
  source 1..22: mol_type = other RNA
tctggtctatctgcctggccct

SEQ ID NO: 7651 - RNA, 22 nt, synthetic construct
  source 1..22: mol_type = other RNA
tctgtctgcagcttgtggcctg

SEQ ID NO: 7652 - RNA, 22 nt, synthetic construct
  source 1..22: mol_type = other RNA
tctgtgctgaccactctgcccc

SEQ ID NO: 7653 - RNA, 22 nt, synthetic construct
  source 1..22: mol_type = other RNA
tcttaggatggccttctccgac

SEQ ID NO: 7654 - RNA, 22 nt, synthetic construct
  source 1..22: mol_type = other RNA
tcttcactcgctgggttccctt

SEQ ID NO: 7655 - RNA, 22 nt, synthetic construct
  source 1..22: mol_type = other RNA
tcttccccttgctctctgctgt

SEQ ID NO: 7656 - RNA, 22 nt, synthetic construct
  source 1..22: mol_type = other RNA
tcttccgatgttgagcccctcc

SEQ ID NO: 7657 - RNA, 22 nt, synthetic construct
  source 1..22: mol_type = other RNA
tcttccgcattggagtcgcttt

SEQ ID NO: 7658 - RNA, 22 nt, synthetic construct
  source 1..22: mol_type = other RNA
tcttcctccactccctcttccc

SEQ ID NO: 7659 - RNA, 22 nt, synthetic construct
  source 1..22: mol_type = other RNA
tcttgctttctttgcctggaca

SEQ ID NO: 7660 - RNA, 22 nt, synthetic construct
  source 1..22: mol_type = other RNA
tcttgtaggcctgcatcatcac

SEQ ID NO: 7661 - RNA, 22 nt, synthetic construct
  source 1..22: mol_type = other RNA
tctttccggagcacttccttct

SEQ ID NO: 7662 - RNA, 22 nt, synthetic construct
  source 1..22: mol_type = other RNA
tctttgcctggacaccccgttc

SEQ ID NO: 7663 - RNA, 22 nt, synthetic construct
  source 1..22: mol_type = other RNA
tgaaaggagtgagaggtgaccc

SEQ ID NO: 7664 - RNA, 22 nt, synthetic construct
  source 1..22: mol_type = other RNA
tgaacctgagccagctcccata

SEQ ID NO: 7665 - RNA, 22 nt, synthetic construct
  source 1..22: mol_type = other RNA
tgaagacggcatggggttgggt

SEQ ID NO: 7666 - RNA, 22 nt, synthetic construct
  source 1..22: mol_type = other RNA
tgaagcggctccaattcggaag

SEQ ID NO: 7667 - RNA, 22 nt, synthetic construct
  source 1..22: mol_type = other RNA
tgaaggaggcggcagggaagga

SEQ ID NO: 7668 - RNA, 22 nt, synthetic construct
  source 1..22: mol_type = other RNA
tgacaatggccagggccaggca

SEQ ID NO: 7669 - RNA, 22 nt, synthetic construct
  source 1..22: mol_type = other RNA
tgacaccccgtcccagtccccc

SEQ ID NO: 7670 - RNA, 22 nt, synthetic construct
  source 1..22: mol_type = other RNA
tgaccactctgccccaggcctc

SEQ ID NO: 7671 - RNA, 22 nt, synthetic construct
  source 1..22: mol_type = other RNA
tgacccaggccacaagctgcag

SEQ ID NO: 7672 - RNA, 22 nt, synthetic construct
  source 1..22: mol_type = other RNA
tgacccatgcagtcctccttac

SEQ ID NO: 7673 - RNA, 22 nt, synthetic construct
  source 1..22: mol_type = other RNA
tgacccgaatccacaggagaac

SEQ ID NO: 7674 - RNA, 22 nt, synthetic construct
  source 1..22: mol_type = other RNA
tgacctgcattctctcccctgg

SEQ ID NO: 7675 - RNA, 22 nt, synthetic construct
  source 1..22: mol_type = other RNA
tgagaggtgacccgaatccaca

SEQ ID NO: 7676 - RNA, 22 nt, synthetic construct
  source 1..22: mol_type = other RNA
tgagccagctcccatagctcag

SEQ ID NO: 7677 - RNA, 22 nt, synthetic construct
  source 1..22: mol_type = other RNA
tgagcccctccagccggtcctg

SEQ ID NO: 7678 - RNA, 22 nt, synthetic construct
  source 1..22: mol_type = other RNA
tgagcggatcctccccgtgtct

SEQ ID NO: 7679 - RNA, 22 nt, synthetic construct
  source 1..22: mol_type = other RNA
tgagctatgggagctggctcag

SEQ ID NO: 7680 - RNA, 22 nt, synthetic construct
  source 1..22: mol_type = other RNA
tgagctctactggcttctgcgc

SEQ ID NO: 7681 - RNA, 22 nt, synthetic construct
  source 1..22: mol_type = other RNA
tgagggaggagagatgcccgga

SEQ ID NO: 7682 - RNA, 22 nt, synthetic construct
  source 1..22: mol_type = other RNA
tgagtccggaccactttgagct

SEQ ID NO: 7683 - RNA, 22 nt, synthetic construct
  source 1..22: mol_type = other RNA
tgatgatgcaggcctacaagaa

SEQ ID NO: 7684 - RNA, 22 nt, synthetic construct
  source 1..22: mol_type = other RNA
tgatgcaggcctacaagaaggg

SEQ ID NO: 7685 - RNA, 22 nt, synthetic construct
  source 1..22: mol_type = other RNA
tgatgtcctctgagcggatcct

SEQ ID NO: 7686 - RNA, 22 nt, synthetic construct
  source 1..22: mol_type = other RNA
tgcaccacgtgatgtcctctga

SEQ ID NO: 7687 - RNA, 22 nt, synthetic construct
  source 1..22: mol_type = other RNA
tgcagacagaaagcggcacagg

SEQ ID NO: 7688 - RNA, 22 nt, synthetic construct
  source 1..22: mol_type = other RNA
tgcagcgccgagaaggaagtgc

SEQ ID NO: 7689 - RNA, 22 nt, synthetic construct
  source 1..22: mol_type = other RNA
tgcagcttgtggcctgggtcac

SEQ ID NO: 7690 - RNA, 22 nt, synthetic construct
  source 1..22: mol_type = other RNA
tgcaggcctacaagaaggggag

SEQ ID NO: 7691 - RNA, 22 nt, synthetic construct
  source 1..22: mol_type = other RNA
tgcaggtcagagaaagcaggac

SEQ ID NO: 7692 - RNA, 22 nt, synthetic construct
  source 1..22: mol_type = other RNA
tgcagtcctccttaccatccct

SEQ ID NO: 7693 - RNA, 22 nt, synthetic construct
  source 1..22: mol_type = other RNA
tgcatcatcaccgtttttctgg

SEQ ID NO: 7694 - RNA, 22 nt, synthetic construct
  source 1..22: mol_type = other RNA
tgcatgggtcagcacaggctgc

SEQ ID NO: 7695 - RNA, 22 nt, synthetic construct
  source 1..22: mol_type = other RNA
tgcattctctcccctgggcctg

SEQ ID NO: 7696 - RNA, 22 nt, synthetic construct
  source 1..22: mol_type = other RNA
tgccaaagccagggccagttaa

SEQ ID NO: 7697 - RNA, 22 nt, synthetic construct
  source 1..22: mol_type = other RNA
tgccaccctatgctgacacccc

SEQ ID NO: 7698 - RNA, 22 nt, synthetic construct
  source 1..22: mol_type = other RNA
tgccatctctcgtttcttagga

SEQ ID NO: 7699 - RNA, 22 nt, synthetic construct
  source 1..22: mol_type = other RNA
tgcccaaatgaaaggagtgaga

SEQ ID NO: 7700 - RNA, 22 nt, synthetic construct
  source 1..22: mol_type = other RNA
tgcccaaggatgctctttccgg

SEQ ID NO: 7701 - RNA, 22 nt, synthetic construct
  source 1..22: mol_type = other RNA
tgccccaggcctccttaccatt

SEQ ID NO: 7702 - RNA, 22 nt, synthetic construct
  source 1..22: mol_type = other RNA
tgcccggagaggacccagacac

SEQ ID NO: 7703 - RNA, 22 nt, synthetic construct
  source 1..22: mol_type = other RNA
tgccctcctctcgcccccgagt

SEQ ID NO: 7704 - RNA, 22 nt, synthetic construct
  source 1..22: mol_type = other RNA
tgccctctaacgctgccgtctc

SEQ ID NO: 7705 - RNA, 22 nt, synthetic construct
  source 1..22: mol_type = other RNA
tgccctctcctgaacctgagcc

SEQ ID NO: 7706 - RNA, 22 nt, synthetic construct
  source 1..22: mol_type = other RNA
tgccctgccctctcctgaacct

SEQ ID NO: 7707 - RNA, 22 nt, synthetic construct
  source 1..22: mol_type = other RNA
tgcccttgctgtgccgccggaa

SEQ ID NO: 7708 - RNA, 22 nt, synthetic construct
  source 1..22: mol_type = other RNA
tgccgccggaactctgccctct

SEQ ID NO: 7709 - RNA, 22 nt, synthetic construct
  source 1..22: mol_type = other RNA
tgccgcctccttcaggttccgt

SEQ ID NO: 7710 - RNA, 22 nt, synthetic construct
  source 1..22: mol_type = other RNA
tgccgctttctgtctgcagctt

SEQ ID NO: 7711 - RNA, 22 nt, synthetic construct
  source 1..22: mol_type = other RNA
tgccgtctctctcctgagtccg

SEQ ID NO: 7712 - RNA, 22 nt, synthetic construct
  source 1..22: mol_type = other RNA
tgccgtcttcactcgctgggtt

SEQ ID NO: 7713 - RNA, 22 nt, synthetic construct
  source 1..22: mol_type = other RNA
tgcctggacaccccgttctcct

SEQ ID NO: 7714 - RNA, 22 nt, synthetic construct
  source 1..22: mol_type = other RNA
tgcctggccctggccattgtca

SEQ ID NO: 7715 - RNA, 22 nt, synthetic construct
  source 1..22: mol_type = other RNA
tgcctgggaaggggaaacagtg

SEQ ID NO: 7716 - RNA, 22 nt, synthetic construct
  source 1..22: mol_type = other RNA
tgcgccgcctctggcccactgt

SEQ ID NO: 7717 - RNA, 22 nt, synthetic construct
  source 1..22: mol_type = other RNA
tgcgctgccctcctctcgcccc

SEQ ID NO: 7718 - RNA, 22 nt, synthetic construct
  source 1..22: mol_type = other RNA
tgcggaagagagtaggtcgaag

SEQ ID NO: 7719 - RNA, 22 nt, synthetic construct
  source 1..22: mol_type = other RNA
tgcgtcccgcctccccttcttg

SEQ ID NO: 7720 - RNA, 22 nt, synthetic construct
  source 1..22: mol_type = other RNA
tgctccggaaagagcatccttg

SEQ ID NO: 7721 - RNA, 22 nt, synthetic construct
  source 1..22: mol_type = other RNA
tgctctctgctgtgttgctgcc

SEQ ID NO: 7722 - RNA, 22 nt, synthetic construct
  source 1..22: mol_type = other RNA
tgctctttccggagcacttcct

SEQ ID NO: 7723 - RNA, 22 nt, synthetic construct
  source 1..22: mol_type = other RNA
tgctgacaccccgtcccagtcc

SEQ ID NO: 7724 - RNA, 22 nt, synthetic construct
  source 1..22: mol_type = other RNA
tgctgaccactctgccccaggc

SEQ ID NO: 7725 - RNA, 22 nt, synthetic construct
  source 1..22: mol_type = other RNA
tgctgacccatgcagtcctcct

SEQ ID NO: 7726 - RNA, 22 nt, synthetic construct
  source 1..22: mol_type = other RNA
tgctgcccaaggatgctctttc

SEQ ID NO: 7727 - RNA, 22 nt, synthetic construct
  source 1..22: mol_type = other RNA
tgctgtgccgccggaactctgc

SEQ ID NO: 7728 - RNA, 22 nt, synthetic construct
  source 1..22: mol_type = other RNA
tgctgtgttgctgcccaaggat

SEQ ID NO: 7729 - RNA, 22 nt, synthetic construct
  source 1..22: mol_type = other RNA
tgctttctctgacctgcattct

SEQ ID NO: 7730 - RNA, 22 nt, synthetic construct
  source 1..22: mol_type = other RNA
tgctttctttgcctggacaccc

SEQ ID NO: 7731 - RNA, 22 nt, synthetic construct
  source 1..22: mol_type = other RNA
tggacaaccccaaagtaccccg

SEQ ID NO: 7732 - RNA, 22 nt, synthetic construct
  source 1..22: mol_type = other RNA
tggacaccccgttctcctgtgg

SEQ ID NO: 7733 - RNA, 22 nt, synthetic construct
  source 1..22: mol_type = other RNA
tggactttgtctccttccctgc

SEQ ID NO: 7734 - RNA, 22 nt, synthetic construct
  source 1..22: mol_type = other RNA
tggagaggtggctaaagccagg

SEQ ID NO: 7735 - RNA, 22 nt, synthetic construct
  source 1..22: mol_type = other RNA
tggagccgcttcaactggccct

SEQ ID NO: 7736 - RNA, 22 nt, synthetic construct
  source 1..22: mol_type = other RNA
tggaggaagacggaacctgaag

SEQ ID NO: 7737 - RNA, 22 nt, synthetic construct
  source 1..22: mol_type = other RNA
tggaggggctcaacatcggaag

SEQ ID NO: 7738 - RNA, 22 nt, synthetic construct
  source 1..22: mol_type = other RNA
tggagtcgctttaactggccct

SEQ ID NO: 7739 - RNA, 22 nt, synthetic construct
  source 1..22: mol_type = other RNA
tggattcgggtcacctctcact

SEQ ID NO: 7740 - RNA, 22 nt, synthetic construct
  source 1..22: mol_type = other RNA
tggcaaagcccagggccaggaa

SEQ ID NO: 7741 - RNA, 22 nt, synthetic construct
  source 1..22: mol_type = other RNA
tggcacaggccccagaaggaga

SEQ ID NO: 7742 - RNA, 22 nt, synthetic construct
  source 1..22: mol_type = other RNA
tggcagcctgtgctgacccatg

SEQ ID NO: 7743 - RNA, 22 nt, synthetic construct
  source 1..22: mol_type = other RNA
tggccagggccaggcagataga

SEQ ID NO: 7744 - RNA, 22 nt, synthetic construct
  source 1..22: mol_type = other RNA
tggccattgtcactttgcgctg

SEQ ID NO: 7745 - RNA, 22 nt, synthetic construct
  source 1..22: mol_type = other RNA
tggcccactgtttccccttccc

SEQ ID NO: 7746 - RNA, 22 nt, synthetic construct
  source 1..22: mol_type = other RNA
tggcccagatccttccctgccg

SEQ ID NO: 7747 - RNA, 22 nt, synthetic construct
  source 1..22: mol_type = other RNA
tggccctggccattgtcacttt

SEQ ID NO: 7748 - RNA, 22 nt, synthetic construct
  source 1..22: mol_type = other RNA
tggccctggctttggcagcctg

SEQ ID NO: 7749 - RNA, 22 nt, synthetic construct
  source 1..22: mol_type = other RNA
tggccctgggcttagccactct

SEQ ID NO: 7750 - RNA, 22 nt, synthetic construct
  source 1..22: mol_type = other RNA
tggccctgggctttgccaccct

SEQ ID NO: 7751 - RNA, 22 nt, synthetic construct
  source 1..22: mol_type = other RNA
tggcctgggtcacctctacggc

SEQ ID NO: 7752 - RNA, 22 nt, synthetic construct
  source 1..22: mol_type = other RNA
tggccttctccgacggatgtct

SEQ ID NO: 7753 - RNA, 22 nt, synthetic construct
  source 1..22: mol_type = other RNA
tggctaaagccagggagacggg

SEQ ID NO: 7754 - RNA, 22 nt, synthetic construct
  source 1..22: mol_type = other RNA
tggctaagcccagggccagttg

SEQ ID NO: 7755 - RNA, 22 nt, synthetic construct
  source 1..22: mol_type = other RNA
tggctcaggttcaggagagggc

SEQ ID NO: 7756 - RNA, 22 nt, synthetic construct
  source 1..22: mol_type = other RNA
tggcttctgcgccgcctctggc

SEQ ID NO: 7757 - RNA, 22 nt, synthetic construct
  source 1..22: mol_type = other RNA
tggctttagccacctctccatc

SEQ ID NO: 7758 - RNA, 22 nt, synthetic construct
  source 1..22: mol_type = other RNA
tggctttggcagcctgtgctga

SEQ ID NO: 7759 - RNA, 22 nt, synthetic construct
  source 1..22: mol_type = other RNA
tgggaaggggaaacagtgggcc

SEQ ID NO: 7760 - RNA, 22 nt, synthetic construct
  source 1..22: mol_type = other RNA
tgggacggggtgtcagcatagg

SEQ ID NO: 7761 - RNA, 22 nt, synthetic construct
  source 1..22: mol_type = other RNA
tgggagctggctcaggttcagg

SEQ ID NO: 7762 - RNA, 22 nt, synthetic construct
  source 1..22: mol_type = other RNA
tgggcagcaacacagcagagag

SEQ ID NO: 7763 - RNA, 22 nt, synthetic construct
  source 1..22: mol_type = other RNA
tgggcagctcccctacccccct

SEQ ID NO: 7764 - RNA, 22 nt, synthetic construct
  source 1..22: mol_type = other RNA
tgggccagaggcggcgcagaag

SEQ ID NO: 7765 - RNA, 22 nt, synthetic construct
  source 1..22: mol_type = other RNA
tgggccagccgtagaggtgacc

SEQ ID NO: 7766 - RNA, 22 nt, synthetic construct
  source 1..22: mol_type = other RNA
tgggcctgtgccgctttctgtc

SEQ ID NO: 7767 - RNA, 22 nt, synthetic construct
  source 1..22: mol_type = other RNA
tgggcttagccactctgtgctg

SEQ ID NO: 7768 - RNA, 22 nt, synthetic construct
  source 1..22: mol_type = other RNA
tgggctttgccaccctatgctg

SEQ ID NO: 7769 - RNA, 22 nt, synthetic construct
  source 1..22: mol_type = other RNA
tggggcagagtggtcagcacag

SEQ ID NO: 7770 - RNA, 22 nt, synthetic construct
  source 1..22: mol_type = other RNA
tggggcctgtgccatctctcgt

SEQ ID NO: 7771 - RNA, 22 nt, synthetic construct
  source 1..22: mol_type = other RNA
tggggtggtcgaaggggaatgg

SEQ ID NO: 7772 - RNA, 22 nt, synthetic construct
  source 1..22: mol_type = other RNA
tggggttgggtgagggaggaga

SEQ ID NO: 7773 - RNA, 22 nt, synthetic construct
  source 1..22: mol_type = other RNA
tggggttgtccagaaaaacggt

SEQ ID NO: 7774 - RNA, 22 nt, synthetic construct
  source 1..22: mol_type = other RNA
tgggtcacctctacggctggcc

SEQ ID NO: 7775 - RNA, 22 nt, synthetic construct
  source 1..22: mol_type = other RNA
tgggtcagcacaggctgccaaa

SEQ ID NO: 7776 - RNA, 22 nt, synthetic construct
  source 1..22: mol_type = other RNA
tgggtcctctccgggcatctct

SEQ ID NO: 7777 - RNA, 22 nt, synthetic construct
  source 1..22: mol_type = other RNA
tgggtgagggaggagagatgcc

SEQ ID NO: 7778 - RNA, 22 nt, synthetic construct
  source 1..22: mol_type = other RNA
tgggttcccttttccttctcct

SEQ ID NO: 7779 - RNA, 22 nt, synthetic construct
  source 1..22: mol_type = other RNA
tggtaaggaggactgcatgggt

SEQ ID NO: 7780 - RNA, 22 nt, synthetic construct
  source 1..22: mol_type = other RNA
tggtaaggaggcctggggcaga

SEQ ID NO: 7781 - RNA, 22 nt, synthetic construct
  source 1..22: mol_type = other RNA
tggtaagggggactgggacggg

SEQ ID NO: 7782 - RNA, 22 nt, synthetic construct
  source 1..22: mol_type = other RNA
tggtcagcacagagtggctaag

SEQ ID NO: 7783 - RNA, 22 nt, synthetic construct
  source 1..22: mol_type = other RNA
tggtccggactcaggagagaga

SEQ ID NO: 7784 - RNA, 22 nt, synthetic construct
  source 1..22: mol_type = other RNA
tggtcgaaggggaatggtaagg

SEQ ID NO: 7785 - RNA, 22 nt, synthetic construct
  source 1..22: mol_type = other RNA
tggtctatctgcctggccctgg

SEQ ID NO: 7786 - RNA, 22 nt, synthetic construct
  source 1..22: mol_type = other RNA
tggtgcagcgccgagaaggaag

SEQ ID NO: 7787 - RNA, 22 nt, synthetic construct
  source 1..22: mol_type = other RNA
tgtaggcctgcatcatcaccgt

SEQ ID NO: 7788 - RNA, 22 nt, synthetic construct
  source 1..22: mol_type = other RNA
tgtcactttgcgctgccctcct

SEQ ID NO: 7789 - RNA, 22 nt, synthetic construct
  source 1..22: mol_type = other RNA
tgtcagcatagggtggcaaagc

SEQ ID NO: 7790 - RNA, 22 nt, synthetic construct
  source 1..22: mol_type = other RNA
tgtccagaaaaacggtgatgat

SEQ ID NO: 7791 - RNA, 22 nt, synthetic construct
  source 1..22: mol_type = other RNA
tgtccaggcaaagaaagcaaga

SEQ ID NO: 7792 - RNA, 22 nt, synthetic construct
  source 1..22: mol_type = other RNA
tgtcctctgagcggatcctccc

SEQ ID NO: 7793 - RNA, 22 nt, synthetic construct
  source 1..22: mol_type = other RNA
tgtctcccttgcgtcccgcctc

SEQ ID NO: 7794 - RNA, 22 nt, synthetic construct
  source 1..22: mol_type = other RNA
tgtctccttccctgccctgccc

SEQ ID NO: 7795 - RNA, 22 nt, synthetic construct
  source 1..22: mol_type = other RNA
tgtctgcagcttgtggcctggg

SEQ ID NO: 7796 - RNA, 22 nt, synthetic construct
  source 1..22: mol_type = other RNA
tgtctgggtcctctccgggcat

SEQ ID NO: 7797 - RNA, 22 nt, synthetic construct
  source 1..22: mol_type = other RNA
tgtgccatctctcgtttcttag

SEQ ID NO: 7798 - RNA, 22 nt, synthetic construct
  source 1..22: mol_type = other RNA
tgtgccgccggaactctgccct

SEQ ID NO: 7799 - RNA, 22 nt, synthetic construct
  source 1..22: mol_type = other RNA
tgtgccgctttctgtctgcagc

SEQ ID NO: 7800 - RNA, 22 nt, synthetic construct
  source 1..22: mol_type = other RNA
tgtgctgaccactctgccccag

SEQ ID NO: 7801 - RNA, 22 nt, synthetic construct
  source 1..22: mol_type = other RNA
tgtgctgacccatgcagtcctc

SEQ ID NO: 7802 - RNA, 22 nt, synthetic construct
  source 1..22: mol_type = other RNA
tgtggattcgggtcacctctca

SEQ ID NO: 7803 - RNA, 22 nt, synthetic construct
  source 1..22: mol_type = other RNA
tgtggcctgggtcacctctacg

SEQ ID NO: 7804 - RNA, 22 nt, synthetic construct
  source 1..22: mol_type = other RNA
tgtgttgctgcccaaggatgct

SEQ ID NO: 7805 - RNA, 22 nt, synthetic construct
  source 1..22: mol_type = other RNA
tgttgagcccctccagccggtc

SEQ ID NO: 7806 - RNA, 22 nt, synthetic construct
  source 1..22: mol_type = other RNA
tgttgctgcccaaggatgctct

SEQ ID NO: 7807 - RNA, 22 nt, synthetic construct
  source 1..22: mol_type = other RNA
tgtttccccttcccaggcaggt

SEQ ID NO: 7808 - RNA, 22 nt, synthetic construct
  source 1..22: mol_type = other RNA
ttaaagcgactccaatgcggaa

SEQ ID NO: 7809 - RNA, 22 nt, synthetic construct
  source 1..22: mol_type = other RNA
ttaactggccctggctttggca

SEQ ID NO: 7810 - RNA, 22 nt, synthetic construct
  source 1..22: mol_type = other RNA
ttaccatccctccctcgacttc

SEQ ID NO: 7811 - RNA, 22 nt, synthetic construct
  source 1..22: mol_type = other RNA
ttaccattccccttcgaccacc

SEQ ID NO: 7812 - RNA, 22 nt, synthetic construct
  source 1..22: mol_type = other RNA
ttaccattccccttcgacctac

SEQ ID NO: 7813 - RNA, 22 nt, synthetic construct
  source 1..22: mol_type = other RNA
ttagagggcagagttccggcgg

SEQ ID NO: 7814 - RNA, 22 nt, synthetic construct
  source 1..22: mol_type = other RNA
ttagccacctctccatcctctt

SEQ ID NO: 7815 - RNA, 22 nt, synthetic construct
  source 1..22: mol_type = other RNA
ttagccactctgtgctgaccac

SEQ ID NO: 7816 - RNA, 22 nt, synthetic construct
  source 1..22: mol_type = other RNA
ttaggatggccttctccgacgg

SEQ ID NO: 7817 - RNA, 22 nt, synthetic construct
  source 1..22: mol_type = other RNA
ttcaactggccctgggcttagc

SEQ ID NO: 7818 - RNA, 22 nt, synthetic construct
  source 1..22: mol_type = other RNA
ttcactcgctgggttccctttt

SEQ ID NO: 7819 - RNA, 22 nt, synthetic construct
  source 1..22: mol_type = other RNA
ttcaggagagggcagggcaggg

SEQ ID NO: 7820 - RNA, 22 nt, synthetic construct
  source 1..22: mol_type = other RNA
ttcaggttccgtcttcctccac

SEQ ID NO: 7821 - RNA, 22 nt, synthetic construct
  source 1..22: mol_type = other RNA
ttcatttgggcagctcccctac

SEQ ID NO: 7822 - RNA, 22 nt, synthetic construct
  source 1..22: mol_type = other RNA
ttcccaggcaggtcctgctttc

SEQ ID NO: 7823 - RNA, 22 nt, synthetic construct
  source 1..22: mol_type = other RNA
ttcccctcttccgatgttgagc

SEQ ID NO: 7824 - RNA, 22 nt, synthetic construct
  source 1..22: mol_type = other RNA
ttccccttcccaggcaggtcct

SEQ ID NO: 7825 - RNA, 22 nt, synthetic construct
  source 1..22: mol_type = other RNA
ttccccttcgaccaccccactt

SEQ ID NO: 7826 - RNA, 22 nt, synthetic construct
  source 1..22: mol_type = other RNA
ttccccttcgacctactctctt

SEQ ID NO: 7827 - RNA, 22 nt, synthetic construct
  source 1..22: mol_type = other RNA
ttccccttgctctctgctgtgt

SEQ ID NO: 7828 - RNA, 22 nt, synthetic construct
  source 1..22: mol_type = other RNA
ttccctgccctgccctctcctg

SEQ ID NO: 7829 - RNA, 22 nt, synthetic construct
  source 1..22: mol_type = other RNA
ttccctgccgcctccttcaggt

SEQ ID NO: 7830 - RNA, 22 nt, synthetic construct
  source 1..22: mol_type = other RNA
ttcccttttccttctccttctg

SEQ ID NO: 7831 - RNA, 22 nt, synthetic construct
  source 1..22: mol_type = other RNA
ttccgaattggagccgcttcaa

SEQ ID NO: 7832 - RNA, 22 nt, synthetic construct
  source 1..22: mol_type = other RNA
ttccgatgttgagcccctccag

SEQ ID NO: 7833 - RNA, 22 nt, synthetic construct
  source 1..22: mol_type = other RNA
ttccgcattggagtcgctttaa

SEQ ID NO: 7834 - RNA, 22 nt, synthetic construct
  source 1..22: mol_type = other RNA
ttccggagcacttccttctcgg

SEQ ID NO: 7835 - RNA, 22 nt, synthetic construct
  source 1..22: mol_type = other RNA
ttccggcggcacagcaagggca

SEQ ID NO: 7836 - RNA, 22 nt, synthetic construct
  source 1..22: mol_type = other RNA
ttccgtcttcctccactccctc

SEQ ID NO: 7837 - RNA, 22 nt, synthetic construct
  source 1..22: mol_type = other RNA
ttcctccactccctcttcccct

SEQ ID NO: 7838 - RNA, 22 nt, synthetic construct
  source 1..22: mol_type = other RNA
ttcctggccctgggctttgcca

SEQ ID NO: 7839 - RNA, 22 nt, synthetic construct
  source 1..22: mol_type = other RNA
ttccttctccttctggggcctg

SEQ ID NO: 7840 - RNA, 22 nt, synthetic construct
  source 1..22: mol_type = other RNA
ttccttctcggcgctgcaccac

SEQ ID NO: 7841 - RNA, 22 nt, synthetic construct
  source 1..22: mol_type = other RNA
ttcgaccaccccacttccgaat

SEQ ID NO: 7842 - RNA, 22 nt, synthetic construct
  source 1..22: mol_type = other RNA
ttcgacctactctcttccgcat

SEQ ID NO: 7843 - RNA, 22 nt, synthetic construct
  source 1..22: mol_type = other RNA
ttcggaagtggggtggtcgaag

SEQ ID NO: 7844 - RNA, 22 nt, synthetic construct
  source 1..22: mol_type = other RNA
ttcgggtcacctctcactcctt

SEQ ID NO: 7845 - RNA, 22 nt, synthetic construct
  source 1..22: mol_type = other RNA
ttctccgacggatgtctccctt

SEQ ID NO: 7846 - RNA, 22 nt, synthetic construct
  source 1..22: mol_type = other RNA
ttctcctgtggattcgggtcac

SEQ ID NO: 7847 - RNA, 22 nt, synthetic construct
  source 1..22: mol_type = other RNA
ttctccttctggggcctgtgcc

SEQ ID NO: 7848 - RNA, 22 nt, synthetic construct
  source 1..22: mol_type = other RNA
ttctcggcgctgcaccacgtga

SEQ ID NO: 7849 - RNA, 22 nt, synthetic construct
  source 1..22: mol_type = other RNA
ttctctcccctgggcctgtgcc

SEQ ID NO: 7850 - RNA, 22 nt, synthetic construct
  source 1..22: mol_type = other RNA
ttctctgacctgcattctctcc

SEQ ID NO: 7851 - RNA, 22 nt, synthetic construct
  source 1..22: mol_type = other RNA
ttctgcgccgcctctggcccac

SEQ ID NO: 7852 - RNA, 22 nt, synthetic construct
  source 1..22: mol_type = other RNA
ttctggacaaccccaaagtacc

SEQ ID NO: 7853 - RNA, 22 nt, synthetic construct
  source 1..22: mol_type = other RNA
ttctggggcctgtgccatctct

SEQ ID NO: 7854 - RNA, 22 nt, synthetic construct
  source 1..22: mol_type = other RNA
ttctgtctgcagcttgtggcct

SEQ ID NO: 7855 - RNA, 22 nt, synthetic construct
  source 1..22: mol_type = other RNA
ttcttaggatggccttctccga

SEQ ID NO: 7856 - RNA, 22 nt, synthetic construct
  source 1..22: mol_type = other RNA
ttcttgtaggcctgcatcatca

SEQ ID NO: 7857 - RNA, 22 nt, synthetic construct
  source 1..22: mol_type = other RNA
ttctttgcctggacaccccgtt

SEQ ID NO: 7858 - RNA, 22 nt, synthetic construct
  source 1..22: mol_type = other RNA
ttgaagcggctccaattcggaa

SEQ ID NO: 7859 - RNA, 22 nt, synthetic construct
  source 1..22: mol_type = other RNA
ttgagcccctccagccggtcct

SEQ ID NO: 7860 - RNA, 22 nt, synthetic construct
  source 1..22: mol_type = other RNA
ttgagctctactggcttctgcg

SEQ ID NO: 7861 - RNA, 22 nt, synthetic construct
  source 1..22: mol_type = other RNA
ttgccaccctatgctgacaccc

SEQ ID NO: 7862 - RNA, 22 nt, synthetic construct
  source 1..22: mol_type = other RNA
ttgcctggacaccccgttctcc

SEQ ID NO: 7863 - RNA, 22 nt, synthetic construct
  source 1..22: mol_type = other RNA
ttgcgctgccctcctctcgccc

SEQ ID NO: 7864 - RNA, 22 nt, synthetic construct
  source 1..22: mol_type = other RNA
ttgcgtcccgcctccccttctt

SEQ ID NO: 7865 - RNA, 22 nt, synthetic construct
  source 1..22: mol_type = other RNA
ttgctctctgctgtgttgctgc

SEQ ID NO: 7866 - RNA, 22 nt, synthetic construct
  source 1..22: mol_type = other RNA
ttgctgcccaaggatgctcttt

SEQ ID NO: 7867 - RNA, 22 nt, synthetic construct
  source 1..22: mol_type = other RNA
ttgctgtgccgccggaactctg

SEQ ID NO: 7868 - RNA, 22 nt, synthetic construct
  source 1..22: mol_type = other RNA
ttgctttctttgcctggacacc

SEQ ID NO: 7869 - RNA, 22 nt, synthetic construct
  source 1..22: mol_type = other RNA
ttggagccgcttcaactggccc

SEQ ID NO: 7870 - RNA, 22 nt, synthetic construct
  source 1..22: mol_type = other RNA
ttggagtcgctttaactggccc

SEQ ID NO: 7871 - RNA, 22 nt, synthetic construct
  source 1..22: mol_type = other RNA
ttggcagcctgtgctgacccat

SEQ ID NO: 7872 - RNA, 22 nt, synthetic construct
  source 1..22: mol_type = other RNA
ttgggcagcaacacagcagaga

SEQ ID NO: 7873 - RNA, 22 nt, synthetic construct
  source 1..22: mol_type = other RNA
ttgggcagctcccctacccccc

SEQ ID NO: 7874 - RNA, 22 nt, synthetic construct
  source 1..22: mol_type = other RNA
ttggggttgtccagaaaaacgg

SEQ ID NO: 7875 - RNA, 22 nt, synthetic construct
  source 1..22: mol_type = other RNA
ttgggtgagggaggagagatgc

SEQ ID NO: 7876 - RNA, 22 nt, synthetic construct
  source 1..22: mol_type = other RNA
ttgtaggcctgcatcatcaccg

SEQ ID NO: 7877 - RNA, 22 nt, synthetic construct
  source 1..22: mol_type = other RNA
ttgtcactttgcgctgccctcc

SEQ ID NO: 7878 - RNA, 22 nt, synthetic construct
  source 1..22: mol_type = other RNA
ttgtccagaaaaacggtgatga

SEQ ID NO: 7879 - RNA, 22 nt, synthetic construct
  source 1..22: mol_type = other RNA
ttgtctccttccctgccctgcc

SEQ ID NO: 7880 - RNA, 22 nt, synthetic construct
  source 1..22: mol_type = other RNA
ttgtggcctgggtcacctctac

SEQ ID NO: 7881 - RNA, 22 nt, synthetic construct
  source 1..22: mol_type = other RNA
tttaactggccctggctttggc

SEQ ID NO: 7882 - RNA, 22 nt, synthetic construct
  source 1..22: mol_type = other RNA
tttagccacctctccatcctct

SEQ ID NO: 7883 - RNA, 22 nt, synthetic construct
  source 1..22: mol_type = other RNA
tttcatttgggcagctccccta

SEQ ID NO: 7884 - RNA, 22 nt, synthetic construct
  source 1..22: mol_type = other RNA
tttccccttcccaggcaggtcc

SEQ ID NO: 7885 - RNA, 22 nt, synthetic construct
  source 1..22: mol_type = other RNA
tttccggagcacttccttctcg

SEQ ID NO: 7886 - RNA, 22 nt, synthetic construct
  source 1..22: mol_type = other RNA
tttccttctccttctggggcct

SEQ ID NO: 7887 - RNA, 22 nt, synthetic construct
  source 1..22: mol_type = other RNA
tttctctgacctgcattctctc

SEQ ID NO: 7888 - RNA, 22 nt, synthetic construct
  source 1..22: mol_type = other RNA
tttctggacaaccccaaagtac

SEQ ID NO: 7889 - RNA, 22 nt, synthetic construct
  source 1..22: mol_type = other RNA
tttctgtctgcagcttgtggcc

SEQ ID NO: 7890 - RNA, 22 nt, synthetic construct
  source 1..22: mol_type = other RNA
tttcttaggatggccttctccg

SEQ ID NO: 7891 - RNA, 22 nt, synthetic construct
  source 1..22: mol_type = other RNA
tttctttgcctggacaccccgt

SEQ ID NO: 7892 - RNA, 22 nt, synthetic construct
  source 1..22: mol_type = other RNA
tttgagctctactggcttctgc

SEQ ID NO: 7893 - RNA, 22 nt, synthetic construct
  source 1..22: mol_type = other RNA
tttgccaccctatgctgacacc

SEQ ID NO: 7894 - RNA, 22 nt, synthetic construct
  source 1..22: mol_type = other RNA
tttgcctggacaccccgttctc

SEQ ID NO: 7895 - RNA, 22 nt, synthetic construct
  source 1..22: mol_type = other RNA
tttgcgctgccctcctctcgcc

SEQ ID NO: 7896 - RNA, 22 nt, synthetic construct
  source 1..22: mol_type = other RNA
tttggcagcctgtgctgaccca

SEQ ID NO: 7897 - RNA, 22 nt, synthetic construct
  source 1..22: mol_type = other RNA
tttgggcagctcccctaccccc

SEQ ID NO: 7898 - RNA, 22 nt, synthetic construct
  source 1..22: mol_type = other RNA
tttggggttgtccagaaaaacg

SEQ ID NO: 7899 - RNA, 22 nt, synthetic construct
  source 1..22: mol_type = other RNA
tttgtctccttccctgccctgc

SEQ ID NO: 7900 - RNA, 22 nt, synthetic construct
  source 1..22: mol_type = other RNA
ttttccttctccttctggggcc

SEQ ID NO: 7901 - RNA, 22 nt, synthetic construct
  source 1..22: mol_type = other RNA
ttttctggacaaccccaaagta

SEQ ID NO: 7902 - RNA, 22 nt, synthetic construct
  source 1..22: mol_type = other RNA
tttttctggacaaccccaaagt

SEQ ID NO: 7903 - RNA, 20 nt, synthetic construct
  source 1..20: mol_type = other RNA
aaacatgctgtcctgaagtg

SEQ ID NO: 7904 - RNA, 20 nt, synthetic construct
  source 1..20: mol_type = other RNA
aacatgctgtcctgaagtgg

SEQ ID NO: 7905 - RNA, 20 nt, synthetic construct
  source 1..20: mol_type = other RNA
aacccgggcccctatgtcca

SEQ ID NO: 7906 - RNA, 20 nt, synthetic construct
  source 1..20: mol_type = other RNA
aagaagactagctgagctct

SEQ ID NO: 7907 - RNA, 20 nt, synthetic construct
  source 1..20: mol_type = other RNA
aagactagctgagctctcgg

SEQ ID NO: 7908 - RNA, 20 nt, synthetic construct
  source 1..20: mol_type = other RNA
aagtggacataggggcccgg

SEQ ID NO: 7909 - RNA, 20 nt, synthetic construct
  source 1..20: mol_type = other RNA
acataggggcccgggttgga

SEQ ID NO: 7910 - RNA, 20 nt, synthetic construct
  source 1..20: mol_type = other RNA
acatgctgtcctgaagtgga

SEQ ID NO: 7911 - RNA, 20 nt, synthetic construct
  source 1..20: mol_type = other RNA
acccctggaagatgccatga

SEQ ID NO: 7912 - RNA, 20 nt, synthetic construct
  source 1..20: mol_type = other RNA
acccgggcccctatgtccac

SEQ ID NO: 7913 - RNA, 20 nt, synthetic construct
  source 1..20: mol_type = other RNA
actagctgagctctcggacc

SEQ ID NO: 7914 - RNA, 20 nt, synthetic construct
  source 1..20: mol_type = other RNA
agaagactagctgagctctc

SEQ ID NO: 7915 - RNA, 20 nt, synthetic construct
  source 1..20: mol_type = other RNA
agactagctgagctctcgga

SEQ ID NO: 7916 - RNA, 20 nt, synthetic construct
  source 1..20: mol_type = other RNA
agagctcagctagtcttctt

SEQ ID NO: 7917 - RNA, 20 nt, synthetic construct
  source 1..20: mol_type = other RNA
agccccctgtcatggcatct

SEQ ID NO: 7918 - RNA, 20 nt, synthetic construct
  source 1..20: mol_type = other RNA
agctagtcttcttcctccaa

SEQ ID NO: 7919 - RNA, 20 nt, synthetic construct
  source 1..20: mol_type = other RNA
agctcagctagtcttcttcc

SEQ ID NO: 7920 - RNA, 20 nt, synthetic construct
  source 1..20: mol_type = other RNA
agctctcggacccctggaag

SEQ ID NO: 7921 - RNA, 20 nt, synthetic construct
  source 1..20: mol_type = other RNA
agctgagctctcggacccct

SEQ ID NO: 7922 - RNA, 20 nt, synthetic construct
  source 1..20: mol_type = other RNA
aggaagaagactagctgagc

SEQ ID NO: 7923 - RNA, 20 nt, synthetic construct
  source 1..20: mol_type = other RNA
aggggcccgggttggaggaa

SEQ ID NO: 7924 - RNA, 20 nt, synthetic construct
  source 1..20: mol_type = other RNA
aggggtccgagagctcagct

SEQ ID NO: 7925 - RNA, 20 nt, synthetic construct
  source 1..20: mol_type = other RNA
agtcttcttcctccaacccg

SEQ ID NO: 7926 - RNA, 20 nt, synthetic construct
  source 1..20: mol_type = other RNA
agtggacataggggcccggg

SEQ ID NO: 7927 - RNA, 20 nt, synthetic construct
  source 1..20: mol_type = other RNA
ataggggcccgggttggagg

SEQ ID NO: 7928 - RNA, 20 nt, synthetic construct
  source 1..20: mol_type = other RNA
atcttccaggggtccgagag

SEQ ID NO: 7929 - RNA, 20 nt, synthetic construct
  source 1..20: mol_type = other RNA
atgctgtcctgaagtggaca

SEQ ID NO: 7930 - RNA, 20 nt, synthetic construct
  source 1..20: mol_type = other RNA
atggcatcttccaggggtcc

SEQ ID NO: 7931 - RNA, 20 nt, synthetic construct
  source 1..20: mol_type = other RNA
caaacatgctgtcctgaagt

SEQ ID NO: 7932 - RNA, 20 nt, synthetic construct
  source 1..20: mol_type = other RNA
caacccgggcccctatgtcc

SEQ ID NO: 7933 - RNA, 20 nt, synthetic construct
  source 1..20: mol_type = other RNA
cagccccctgtcatggcatc

SEQ ID NO: 7934 - RNA, 20 nt, synthetic construct
  source 1..20: mol_type = other RNA
cagctagtcttcttcctcca

SEQ ID NO: 7935 - RNA, 20 nt, synthetic construct
  source 1..20: mol_type = other RNA
caggggtccgagagctcagc

SEQ ID NO: 7936 - RNA, 20 nt, synthetic construct
  source 1..20: mol_type = other RNA
cataggggcccgggttggag

SEQ ID NO: 7937 - RNA, 20 nt, synthetic construct
  source 1..20: mol_type = other RNA
catcttccaggggtccgaga

SEQ ID NO: 7938 - RNA, 20 nt, synthetic construct
  source 1..20: mol_type = other RNA
catgctgtcctgaagtggac

SEQ ID NO: 7939 - RNA, 20 nt, synthetic construct
  source 1..20: mol_type = other RNA
catggcatcttccaggggtc

SEQ ID NO: 7940 - RNA, 20 nt, synthetic construct
  source 1..20: mol_type = other RNA
ccaacccgggcccctatgtc

SEQ ID NO: 7941 - RNA, 20 nt, synthetic construct
  source 1..20: mol_type = other RNA
ccagccccctgtcatggcat

SEQ ID NO: 7942 - RNA, 20 nt, synthetic construct
  source 1..20: mol_type = other RNA
ccaggggtccgagagctcag

SEQ ID NO: 7943 - RNA, 20 nt, synthetic construct
  source 1..20: mol_type = other RNA
ccccctgtcatggcatcttc

SEQ ID NO: 7944 - RNA, 20 nt, synthetic construct
  source 1..20: mol_type = other RNA
cccctatgtccacttcagga

SEQ ID NO: 7945 - RNA, 20 nt, synthetic construct
  source 1..20: mol_type = other RNA
cccctggaagatgccatgac

SEQ ID NO: 7946 - RNA, 20 nt, synthetic construct
  source 1..20: mol_type = other RNA
cccctgtcatggcatcttcc

SEQ ID NO: 7947 - RNA, 20 nt, synthetic construct
  source 1..20: mol_type = other RNA
cccgggcccctatgtccact

SEQ ID NO: 7948 - RNA, 20 nt, synthetic construct
  source 1..20: mol_type = other RNA
cccgggttggaggaagaaga

SEQ ID NO: 7949 - RNA, 20 nt, synthetic construct
  source 1..20: mol_type = other RNA
ccctatgtccacttcaggac

SEQ ID NO: 7950 - RNA, 20 nt, synthetic construct
  source 1..20: mol_type = other RNA
ccctggaagatgccatgaca

SEQ ID NO: 7951 - RNA, 20 nt, synthetic construct
  source 1..20: mol_type = other RNA
ccctgtcatggcatcttcca

SEQ ID NO: 7952 - RNA, 20 nt, synthetic construct
  source 1..20: mol_type = other RNA
ccgagagctcagctagtctt

SEQ ID NO: 7953 - RNA, 20 nt, synthetic construct
  source 1..20: mol_type = other RNA
ccgggcccctatgtccactt

SEQ ID NO: 7954 - RNA, 20 nt, synthetic construct
  source 1..20: mol_type = other RNA
ccgggttggaggaagaagac

SEQ ID NO: 7955 - RNA, 20 nt, synthetic construct
  source 1..20: mol_type = other RNA
cctatgtccacttcaggaca

SEQ ID NO: 7956 - RNA, 20 nt, synthetic construct
  source 1..20: mol_type = other RNA
cctccaacccgggcccctat

SEQ ID NO: 7957 - RNA, 20 nt, synthetic construct
  source 1..20: mol_type = other RNA
cctgaagtggacataggggc

SEQ ID NO: 7958 - RNA, 20 nt, synthetic construct
  source 1..20: mol_type = other RNA
cctggaagatgccatgacag

SEQ ID NO: 7959 - RNA, 20 nt, synthetic construct
  source 1..20: mol_type = other RNA
cctgtcatggcatcttccag

SEQ ID NO: 7960 - RNA, 20 nt, synthetic construct
  source 1..20: mol_type = other RNA
cgagagctcagctagtcttc

SEQ ID NO: 7961 - RNA, 20 nt, synthetic construct
  source 1..20: mol_type = other RNA
cggacccctggaagatgcca

SEQ ID NO: 7962 - RNA, 20 nt, synthetic construct
  source 1..20: mol_type = other RNA
cgggcccctatgtccacttc

SEQ ID NO: 7963 - RNA, 20 nt, synthetic construct
  source 1..20: mol_type = other RNA
cgggttggaggaagaagact

SEQ ID NO: 7964 - RNA, 20 nt, synthetic construct
  source 1..20: mol_type = other RNA
ctagctgagctctcggaccc

SEQ ID NO: 7965 - RNA, 20 nt, synthetic construct
  source 1..20: mol_type = other RNA
ctagtcttcttcctccaacc

SEQ ID NO: 7966 - RNA, 20 nt, synthetic construct
  source 1..20: mol_type = other RNA
ctatgtccacttcaggacag

SEQ ID NO: 7967 - RNA, 20 nt, synthetic construct
  source 1..20: mol_type = other RNA
ctcagctagtcttcttcctc

SEQ ID NO: 7968 - RNA, 20 nt, synthetic construct
  source 1..20: mol_type = other RNA
ctccaacccgggcccctatg

SEQ ID NO: 7969 - RNA, 20 nt, synthetic construct
  source 1..20: mol_type = other RNA
ctcggacccctggaagatgc

SEQ ID NO: 7970 - RNA, 20 nt, synthetic construct
  source 1..20: mol_type = other RNA
ctctcggacccctggaagat

SEQ ID NO: 7971 - RNA, 20 nt, synthetic construct
  source 1..20: mol_type = other RNA
ctgaagtggacataggggcc

SEQ ID NO: 7972 - RNA, 20 nt, synthetic construct
  source 1..20: mol_type = other RNA
ctgagctctcggacccctgg

SEQ ID NO: 7973 - RNA, 20 nt, synthetic construct
  source 1..20: mol_type = other RNA
ctggaagatgccatgacagg

SEQ ID NO: 7974 - RNA, 20 nt, synthetic construct
  source 1..20: mol_type = other RNA
ctgtcatggcatcttccagg

SEQ ID NO: 7975 - RNA, 20 nt, synthetic construct
  source 1..20: mol_type = other RNA
ctgtcctgaagtggacatag

SEQ ID NO: 7976 - RNA, 20 nt, synthetic construct
  source 1..20: mol_type = other RNA
cttccaggggtccgagagct

SEQ ID NO: 7977 - RNA, 20 nt, synthetic construct
  source 1..20: mol_type = other RNA
cttcctccaacccgggcccc

SEQ ID NO: 7978 - RNA, 20 nt, synthetic construct
  source 1..20: mol_type = other RNA
cttcttcctccaacccgggc

SEQ ID NO: 7979 - RNA, 20 nt, synthetic construct
  source 1..20: mol_type = other RNA
gaagaagactagctgagctc

SEQ ID NO: 7980 - RNA, 20 nt, synthetic construct
  source 1..20: mol_type = other RNA
gaagactagctgagctctcg

SEQ ID NO: 7981 - RNA, 20 nt, synthetic construct
  source 1..20: mol_type = other RNA
gaagtggacataggggcccg

SEQ ID NO: 7982 - RNA, 20 nt, synthetic construct
  source 1..20: mol_type = other RNA
gacataggggcccgggttgg

SEQ ID NO: 7983 - RNA, 20 nt, synthetic construct
  source 1..20: mol_type = other RNA
gacccctggaagatgccatg

SEQ ID NO: 7984 - RNA, 20 nt, synthetic construct
  source 1..20: mol_type = other RNA
gactagctgagctctcggac

SEQ ID NO: 7985 - RNA, 20 nt, synthetic construct
  source 1..20: mol_type = other RNA
gagagctcagctagtcttct

SEQ ID NO: 7986 - RNA, 20 nt, synthetic construct
  source 1..20: mol_type = other RNA
gagctcagctagtcttcttc

SEQ ID NO: 7987 - RNA, 20 nt, synthetic construct
  source 1..20: mol_type = other RNA
gagctctcggacccctggaa

SEQ ID NO: 7988 - RNA, 20 nt, synthetic construct
  source 1..20: mol_type = other RNA
gaggaagaagactagctgag

SEQ ID NO: 7989 - RNA, 20 nt, synthetic construct
  source 1..20: mol_type = other RNA
gcatcttccaggggtccgag

SEQ ID NO: 7990 - RNA, 20 nt, synthetic construct
  source 1..20: mol_type = other RNA
gccccctgtcatggcatctt

SEQ ID NO: 7991 - RNA, 20 nt, synthetic construct
  source 1..20: mol_type = other RNA
gcccctatgtccacttcagg

SEQ ID NO: 7992 - RNA, 20 nt, synthetic construct
  source 1..20: mol_type = other RNA
gcccgggttggaggaagaag

SEQ ID NO: 7993 - RNA, 20 nt, synthetic construct
  source 1..20: mol_type = other RNA
gctagtcttcttcctccaac

SEQ ID NO: 7994 - RNA, 20 nt, synthetic construct
  source 1..20: mol_type = other RNA
gctcagctagtcttcttcct

SEQ ID NO: 7995 - RNA, 20 nt, synthetic construct
  source 1..20: mol_type = other RNA
gctctcggacccctggaaga

SEQ ID NO: 7996 - RNA, 20 nt, synthetic construct
  source 1..20: mol_type = other RNA
gctgagctctcggacccctg

SEQ ID NO: 7997 - RNA, 20 nt, synthetic construct
  source 1..20: mol_type = other RNA
gctgtcctgaagtggacata

SEQ ID NO: 7998 - RNA, 20 nt, synthetic construct
  source 1..20: mol_type = other RNA
ggaagaagactagctgagct

SEQ ID NO: 7999 - RNA, 20 nt, synthetic construct
  source 1..20: mol_type = other RNA
ggacataggggcccgggttg

SEQ ID NO: 8000 - RNA, 20 nt, synthetic construct
  source 1..20: mol_type = other RNA
ggacccctggaagatgccat

SEQ ID NO: 8001 - RNA, 20 nt, synthetic construct
  source 1..20: mol_type = other RNA
ggaggaagaagactagctga

SEQ ID NO: 8002 - RNA, 20 nt, synthetic construct
  source 1..20: mol_type = other RNA
ggcatcttccaggggtccga

SEQ ID NO: 8003 - RNA, 20 nt, synthetic construct
  source 1..20: mol_type = other RNA
ggcccctatgtccacttcag

SEQ ID NO: 8004 - RNA, 20 nt, synthetic construct
  source 1..20: mol_type = other RNA
ggcccgggttggaggaagaa

SEQ ID NO: 8005 - RNA, 20 nt, synthetic construct
  source 1..20: mol_type = other RNA
gggcccctatgtccacttca

SEQ ID NO: 8006 - RNA, 20 nt, synthetic construct
  source 1..20: mol_type = other RNA
gggcccgggttggaggaaga

SEQ ID NO: 8007 - RNA, 20 nt, synthetic construct
  source 1..20: mol_type = other RNA
ggggcccgggttggaggaag

SEQ ID NO: 8008 - RNA, 20 nt, synthetic construct
  source 1..20: mol_type = other RNA
ggggtccgagagctcagcta

SEQ ID NO: 8009 - RNA, 20 nt, synthetic construct
  source 1..20: mol_type = other RNA
gggtccgagagctcagctag

SEQ ID NO: 8010 - RNA, 20 nt, synthetic construct
  source 1..20: mol_type = other RNA
gggttggaggaagaagacta

SEQ ID NO: 8011 - RNA, 20 nt, synthetic construct
  source 1..20: mol_type = other RNA
ggtccgagagctcagctagt

SEQ ID NO: 8012 - RNA, 20 nt, synthetic construct
  source 1..20: mol_type = other RNA
ggttggaggaagaagactag

SEQ ID NO: 8013 - RNA, 20 nt, synthetic construct
  source 1..20: mol_type = other RNA
gtcatggcatcttccagggg

SEQ ID NO: 8014 - RNA, 20 nt, synthetic construct
  source 1..20: mol_type = other RNA
gtccgagagctcagctagtc

SEQ ID NO: 8015 - RNA, 20 nt, synthetic construct
  source 1..20: mol_type = other RNA
gtcctgaagtggacataggg

SEQ ID NO: 8016 - RNA, 20 nt, synthetic construct
  source 1..20: mol_type = other RNA
gtcttcttcctccaacccgg

SEQ ID NO: 8017 - RNA, 20 nt, synthetic construct
  source 1..20: mol_type = other RNA
gtggacataggggcccgggt

SEQ ID NO: 8018 - RNA, 20 nt, synthetic construct
  source 1..20: mol_type = other RNA
gttggaggaagaagactagc

SEQ ID NO: 8019 - RNA, 20 nt, synthetic construct
  source 1..20: mol_type = other RNA
tagctgagctctcggacccc

SEQ ID NO: 8020 - RNA, 20 nt, synthetic construct
  source 1..20: mol_type = other RNA
taggggcccgggttggagga

SEQ ID NO: 8021 - RNA, 20 nt, synthetic construct
  source 1..20: mol_type = other RNA
tagtcttcttcctccaaccc

SEQ ID NO: 8022 - RNA, 20 nt, synthetic construct
  source 1..20: mol_type = other RNA
tcagctagtcttcttcctcc

SEQ ID NO: 8023 - RNA, 20 nt, synthetic construct
  source 1..20: mol_type = other RNA
tcatggcatcttccaggggt

SEQ ID NO: 8024 - RNA, 20 nt, synthetic construct
  source 1..20: mol_type = other RNA
tccaacccgggcccctatgt

SEQ ID NO: 8025 - RNA, 20 nt, synthetic construct
  source 1..20: mol_type = other RNA
tccagccccctgtcatggca

SEQ ID NO: 8026 - RNA, 20 nt, synthetic construct
  source 1..20: mol_type = other RNA
tccaggggtccgagagctca

SEQ ID NO: 8027 - RNA, 20 nt, synthetic construct
  source 1..20: mol_type = other RNA
tccgagagctcagctagtct

SEQ ID NO: 8028 - RNA, 20 nt, synthetic construct
  source 1..20: mol_type = other RNA
tcctccaacccgggccccta

SEQ ID NO: 8029 - RNA, 20 nt, synthetic construct
  source 1..20: mol_type = other RNA
tcctgaagtggacatagggg

SEQ ID NO: 8030 - RNA, 20 nt, synthetic construct
  source 1..20: mol_type = other RNA
tcggacccctggaagatgcc

SEQ ID NO: 8031 - RNA, 20 nt, synthetic construct
  source 1..20: mol_type = other RNA
tctcggacccctggaagatg

SEQ ID NO: 8032 - RNA, 20 nt, synthetic construct
  source 1..20: mol_type = other RNA
tcttccaggggtccgagagc

SEQ ID NO: 8033 - RNA, 20 nt, synthetic construct
  source 1..20: mol_type = other RNA
tcttcctccaacccgggccc

SEQ ID NO: 8034 - RNA, 20 nt, synthetic construct
  source 1..20: mol_type = other RNA
tcttcttcctccaacccggg

SEQ ID NO: 8035 - RNA, 20 nt, synthetic construct
  source 1..20: mol_type = other RNA
tgaagtggacataggggccc

SEQ ID NO: 8036 - RNA, 20 nt, synthetic construct
  source 1..20: mol_type = other RNA
tgagctctcggacccctgga

SEQ ID NO: 8037 - RNA, 20 nt, synthetic construct
  source 1..20: mol_type = other RNA
tgctgtcctgaagtggacat

SEQ ID NO: 8038 - RNA, 20 nt, synthetic construct
  source 1..20: mol_type = other RNA
tggaagatgccatgacaggg

SEQ ID NO: 8039 - RNA, 20 nt, synthetic construct
  source 1..20: mol_type = other RNA
tggacataggggcccgggtt

SEQ ID NO: 8040 - RNA, 20 nt, synthetic construct
  source 1..20: mol_type = other RNA
tggaggaagaagactagctg

SEQ ID NO: 8041 - RNA, 20 nt, synthetic construct
  source 1..20: mol_type = other RNA
tggcatcttccaggggtccg

SEQ ID NO: 8042 - RNA, 20 nt, synthetic construct
  source 1..20: mol_type = other RNA
tgtcatggcatcttccaggg

SEQ ID NO: 8043 - RNA, 20 nt, synthetic construct
  source 1..20: mol_type = other RNA
tgtcctgaagtggacatagg

SEQ ID NO: 8044 - RNA, 20 nt, synthetic construct
  source 1..20: mol_type = other RNA
ttccagccccctgtcatggc

SEQ ID NO: 8045 - RNA, 20 nt, synthetic construct
  source 1..20: mol_type = other RNA
ttccaggggtccgagagctc

SEQ ID NO: 8046 - RNA, 20 nt, synthetic construct
  source 1..20: mol_type = other RNA
ttcctccaacccgggcccct

SEQ ID NO: 8047 - RNA, 20 nt, synthetic construct
  source 1..20: mol_type = other RNA
ttcttcctccaacccgggcc

SEQ ID NO: 8048 - RNA, 20 nt, synthetic construct
  source 1..20: mol_type = other RNA
ttggaggaagaagactagct

SEQ ID NO: 8049 - RNA, 21 nt, synthetic construct
  source 1..21: mol_type = other RNA
aaacatgctgtcctgaagtgg

SEQ ID NO: 8050 - RNA, 21 nt, synthetic construct
  source 1..21: mol_type = other RNA
aacatgctgtcctgaagtgga

SEQ ID NO: 8051 - RNA, 21 nt, synthetic construct
  source 1..21: mol_type = other RNA
aacccgggcccctatgtccac

SEQ ID NO: 8052 - RNA, 21 nt, synthetic construct
  source 1..21: mol_type = other RNA
aagaagactagctgagctctc

SEQ ID NO: 8053 - RNA, 21 nt, synthetic construct
  source 1..21: mol_type = other RNA
aagactagctgagctctcgga

SEQ ID NO: 8054 - RNA, 21 nt, synthetic construct
  source 1..21: mol_type = other RNA
aagtggacataggggcccggg

SEQ ID NO: 8055 - RNA, 21 nt, synthetic construct
  source 1..21: mol_type = other RNA
acataggggcccgggttggag

SEQ ID NO: 8056 - RNA, 21 nt, synthetic construct
  source 1..21: mol_type = other RNA
acatgctgtcctgaagtggac

SEQ ID NO: 8057 - RNA, 21 nt, synthetic construct
  source 1..21: mol_type = other RNA
acccctggaagatgccatgac

SEQ ID NO: 8058 - RNA, 21 nt, synthetic construct
  source 1..21: mol_type = other RNA
acccgggcccctatgtccact

SEQ ID NO: 8059 - RNA, 21 nt, synthetic construct
  source 1..21: mol_type = other RNA
actagctgagctctcggaccc

SEQ ID NO: 8060 - RNA, 21 nt, synthetic construct
  source 1..21: mol_type = other RNA
agaagactagctgagctctcg

SEQ ID NO: 8061 - RNA, 21 nt, synthetic construct
  source 1..21: mol_type = other RNA
agactagctgagctctcggac

SEQ ID NO: 8062 - RNA, 21 nt, synthetic construct
  source 1..21: mol_type = other RNA
agagctcagctagtcttcttc

SEQ ID NO: 8063 - RNA, 21 nt, synthetic construct
  source 1..21: mol_type = other RNA
agccccctgtcatggcatctt

SEQ ID NO: 8064 - RNA, 21 nt, synthetic construct
  source 1..21: mol_type = other RNA
agctagtcttcttcctccaac

SEQ ID NO: 8065 - RNA, 21 nt, synthetic construct
  source 1..21: mol_type = other RNA
agctcagctagtcttcttcct

SEQ ID NO: 8066 - RNA, 21 nt, synthetic construct
  source 1..21: mol_type = other RNA
agctctcggacccctggaaga

SEQ ID NO: 8067 - RNA, 21 nt, synthetic construct
  source 1..21: mol_type = other RNA
agctgagctctcggacccctg

SEQ ID NO: 8068 - RNA, 21 nt, synthetic construct
  source 1..21: mol_type = other RNA
aggaagaagactagctgagct

SEQ ID NO: 8069 - RNA, 21 nt, synthetic construct
  source 1..21: mol_type = other RNA
aggggcccgggttggaggaag

SEQ ID NO: 8070 - RNA, 21 nt, synthetic construct
  source 1..21: mol_type = other RNA
aggggtccgagagctcagcta

SEQ ID NO: 8071 - RNA, 21 nt, synthetic construct
  source 1..21: mol_type = other RNA
agtcttcttcctccaacccgg

SEQ ID NO: 8072 - RNA, 21 nt, synthetic construct
  source 1..21: mol_type = other RNA
agtggacataggggcccgggt

SEQ ID NO: 8073 - RNA, 21 nt, synthetic construct
  source 1..21: mol_type = other RNA
ataggggcccgggttggagga

SEQ ID NO: 8074 - RNA, 21 nt, synthetic construct
  source 1..21: mol_type = other RNA
atcttccaggggtccgagagc

SEQ ID NO: 8075 - RNA, 21 nt, synthetic construct
  source 1..21: mol_type = other RNA
atgctgtcctgaagtggacat

SEQ ID NO: 8076 - RNA, 21 nt, synthetic construct
  source 1..21: mol_type = other RNA
atggcatcttccaggggtccg

SEQ ID NO: 8077 - RNA, 21 nt, synthetic construct
  source 1..21: mol_type = other RNA
caaacatgctgtcctgaagtg

SEQ ID NO: 8078 - RNA, 21 nt, synthetic construct
  source 1..21: mol_type = other RNA
caacccgggcccctatgtcca

SEQ ID NO: 8079 - RNA, 21 nt, synthetic construct
  source 1..21: mol_type = other RNA
cagccccctgtcatggcatct

SEQ ID NO: 8080 - RNA, 21 nt, synthetic construct
  source 1..21: mol_type = other RNA
cagctagtcttcttcctccaa

SEQ ID NO: 8081 - RNA, 21 nt, synthetic construct
  source 1..21: mol_type = other RNA
caggggtccgagagctcagct

SEQ ID NO: 8082 - RNA, 21 nt, synthetic construct
  source 1..21: mol_type = other RNA
cataggggcccgggttggagg

SEQ ID NO: 8083 - RNA, 21 nt, synthetic construct
  source 1..21: mol_type = other RNA
catcttccaggggtccgagag

SEQ ID NO: 8084 - RNA, 21 nt, synthetic construct
  source 1..21: mol_type = other RNA
catgctgtcctgaagtggaca

SEQ ID NO: 8085 - RNA, 21 nt, synthetic construct
  source 1..21: mol_type = other RNA
catggcatcttccaggggtcc

SEQ ID NO: 8086 - RNA, 21 nt, synthetic construct
  source 1..21: mol_type = other RNA
ccaacccgggcccctatgtcc

SEQ ID NO: 8087 - RNA, 21 nt, synthetic construct
  source 1..21: mol_type = other RNA
ccagccccctgtcatggcatc

SEQ ID NO: 8088 - RNA, 21 nt, synthetic construct
  source 1..21: mol_type = other RNA
ccaggggtccgagagctcagc

SEQ ID NO: 8089 - RNA, 21 nt, synthetic construct
  source 1..21: mol_type = other RNA
ccccctgtcatggcatcttcc

SEQ ID NO: 8090 - RNA, 21 nt, synthetic construct
  source 1..21: mol_type = other RNA
cccctatgtccacttcaggac

SEQ ID NO: 8091 - RNA, 21 nt, synthetic construct
  source 1..21: mol_type = other RNA
cccctggaagatgccatgaca

SEQ ID NO: 8092 - RNA, 21 nt, synthetic construct
  source 1..21: mol_type = other RNA
cccctgtcatggcatcttcca

SEQ ID NO: 8093 - RNA, 21 nt, synthetic construct
  source 1..21: mol_type = other RNA
cccgggcccctatgtccactt

SEQ ID NO: 8094 - RNA, 21 nt, synthetic construct
  source 1..21: mol_type = other RNA
cccgggttggaggaagaagac

SEQ ID NO: 8095 - RNA, 21 nt, synthetic construct
  source 1..21: mol_type = other RNA
ccctatgtccacttcaggaca

SEQ ID NO: 8096 - RNA, 21 nt, synthetic construct
  source 1..21: mol_type = other RNA
ccctggaagatgccatgacag

SEQ ID NO: 8097 - RNA, 21 nt, synthetic construct
  source 1..21: mol_type = other RNA
ccctgtcatggcatcttccag

SEQ ID NO: 8098 - RNA, 21 nt, synthetic construct
  source 1..21: mol_type = other RNA
ccgagagctcagctagtcttc

SEQ ID NO: 8099 - RNA, 21 nt, synthetic construct
  source 1..21: mol_type = other RNA
ccgggcccctatgtccacttc

SEQ ID NO: 8100 - RNA, 21 nt, synthetic construct
  source 1..21: mol_type = other RNA
ccgggttggaggaagaagact

SEQ ID NO: 8101 - RNA, 21 nt, synthetic construct
  source 1..21: mol_type = other RNA
cctatgtccacttcaggacag

SEQ ID NO: 8102 - RNA, 21 nt, synthetic construct
  source 1..21: mol_type = other RNA
cctccaacccgggcccctatg

SEQ ID NO: 8103 - RNA, 21 nt, synthetic construct
  source 1..21: mol_type = other RNA
cctgaagtggacataggggcc

SEQ ID NO: 8104 - RNA, 21 nt, synthetic construct
  source 1..21: mol_type = other RNA
cctggaagatgccatgacagg

SEQ ID NO: 8105 - RNA, 21 nt, synthetic construct
  source 1..21: mol_type = other RNA
cctgtcatggcatcttccagg

SEQ ID NO: 8106 - RNA, 21 nt, synthetic construct
  source 1..21: mol_type = other RNA
cgagagctcagctagtcttct

SEQ ID NO: 8107 - RNA, 21 nt, synthetic construct
  source 1..21: mol_type = other RNA
cggacccctggaagatgccat

SEQ ID NO: 8108 - RNA, 21 nt, synthetic construct
  source 1..21: mol_type = other RNA
cgggcccctatgtccacttca

SEQ ID NO: 8109 - RNA, 21 nt, synthetic construct
  source 1..21: mol_type = other RNA
cgggttggaggaagaagacta

SEQ ID NO: 8110 - RNA, 21 nt, synthetic construct
  source 1..21: mol_type = other RNA
ctagctgagctctcggacccc

SEQ ID NO: 8111 - RNA, 21 nt, synthetic construct
  source 1..21: mol_type = other RNA
ctagtcttcttcctccaaccc

SEQ ID NO: 8112 - RNA, 21 nt, synthetic construct
  source 1..21: mol_type = other RNA
ctcagctagtcttcttcctcc

SEQ ID NO: 8113 - RNA, 21 nt, synthetic construct
  source 1..21: mol_type = other RNA
ctccaacccgggcccctatgt

SEQ ID NO: 8114 - RNA, 21 nt, synthetic construct
  source 1..21: mol_type = other RNA
ctcggacccctggaagatgcc

SEQ ID NO: 8115 - RNA, 21 nt, synthetic construct
  source 1..21: mol_type = other RNA
ctctcggacccctggaagatg

SEQ ID NO: 8116 - RNA, 21 nt, synthetic construct
  source 1..21: mol_type = other RNA
ctgaagtggacataggggccc

SEQ ID NO: 8117 - RNA, 21 nt, synthetic construct
  source 1..21: mol_type = other RNA
ctgagctctcggacccctgga

SEQ ID NO: 8118 - RNA, 21 nt, synthetic construct
  source 1..21: mol_type = other RNA
ctggaagatgccatgacaggg

SEQ ID NO: 8119 - RNA, 21 nt, synthetic construct
  source 1..21: mol_type = other RNA
ctgtcatggcatcttccaggg

SEQ ID NO: 8120 - RNA, 21 nt, synthetic construct
  source 1..21: mol_type = other RNA
ctgtcctgaagtggacatagg

SEQ ID NO: 8121 - RNA, 21 nt, synthetic construct
  source 1..21: mol_type = other RNA
cttccaggggtccgagagctc

SEQ ID NO: 8122 - RNA, 21 nt, synthetic construct
  source 1..21: mol_type = other RNA
cttcctccaacccgggcccct

SEQ ID NO: 8123 - RNA, 21 nt, synthetic construct
  source 1..21: mol_type = other RNA
cttcttcctccaacccgggcc

SEQ ID NO: 8124 - RNA, 21 nt, synthetic construct
  source 1..21: mol_type = other RNA
gaagaagactagctgagctct

SEQ ID NO: 8125 - RNA, 21 nt, synthetic construct
  source 1..21: mol_type = other RNA
gaagactagctgagctctcgg

SEQ ID NO: 8126 - RNA, 21 nt, synthetic construct
  source 1..21: mol_type = other RNA
gaagtggacataggggcccgg

SEQ ID NO: 8127 - RNA, 21 nt, synthetic construct
  source 1..21: mol_type = other RNA
gacataggggcccgggttgga

SEQ ID NO: 8128 - RNA, 21 nt, synthetic construct
  source 1..21: mol_type = other RNA
gacccctggaagatgccatga

SEQ ID NO: 8129 - RNA, 21 nt, synthetic construct
  source 1..21: mol_type = other RNA
gactagctgagctctcggacc

SEQ ID NO: 8130 - RNA, 21 nt, synthetic construct
  source 1..21: mol_type = other RNA
gagagctcagctagtcttctt

SEQ ID NO: 8131 - RNA, 21 nt, synthetic construct
  source 1..21: mol_type = other RNA
gagctcagctagtcttcttcc

SEQ ID NO: 8132 - RNA, 21 nt, synthetic construct
  source 1..21: mol_type = other RNA
gagctctcggacccctggaag

SEQ ID NO: 8133 - RNA, 21 nt, synthetic construct
  source 1..21: mol_type = other RNA
gaggaagaagactagctgagc

SEQ ID NO: 8134 - RNA, 21 nt, synthetic construct
  source 1..21: mol_type = other RNA
gcatcttccaggggtccgaga

SEQ ID NO: 8135 - RNA, 21 nt, synthetic construct
  source 1..21: mol_type = other RNA
gccccctgtcatggcatcttc

SEQ ID NO: 8136 - RNA, 21 nt, synthetic construct
  source 1..21: mol_type = other RNA
gcccctatgtccacttcagga

SEQ ID NO: 8137 - RNA, 21 nt, synthetic construct
  source 1..21: mol_type = other RNA
gcccgggttggaggaagaaga

SEQ ID NO: 8138 - RNA, 21 nt, synthetic construct
  source 1..21: mol_type = other RNA
gctagtcttcttcctccaacc

SEQ ID NO: 8139 - RNA, 21 nt, synthetic construct
  source 1..21: mol_type = other RNA
gctcagctagtcttcttcctc

SEQ ID NO: 8140 - RNA, 21 nt, synthetic construct
  source 1..21: mol_type = other RNA
gctctcggacccctggaagat

SEQ ID NO: 8141 - RNA, 21 nt, synthetic construct
  source 1..21: mol_type = other RNA
gctgagctctcggacccctgg

SEQ ID NO: 8142 - RNA, 21 nt, synthetic construct
  source 1..21: mol_type = other RNA
gctgtcctgaagtggacatag

SEQ ID NO: 8143 - RNA, 21 nt, synthetic construct
  source 1..21: mol_type = other RNA
ggaagaagactagctgagctc

SEQ ID NO: 8144 - RNA, 21 nt, synthetic construct
  source 1..21: mol_type = other RNA
ggacataggggcccgggttgg

SEQ ID NO: 8145 - RNA, 21 nt, synthetic construct
  source 1..21: mol_type = other RNA
ggacccctggaagatgccatg

SEQ ID NO: 8146 - RNA, 21 nt, synthetic construct
  source 1..21: mol_type = other RNA
ggaggaagaagactagctgag

SEQ ID NO: 8147 - RNA, 21 nt, synthetic construct
  source 1..21: mol_type = other RNA
ggcatcttccaggggtccgag

SEQ ID NO: 8148 - RNA, 21 nt, synthetic construct
  source 1..21: mol_type = other RNA
ggcccctatgtccacttcagg

SEQ ID NO: 8149 - RNA, 21 nt, synthetic construct
  source 1..21: mol_type = other RNA
ggcccgggttggaggaagaag

SEQ ID NO: 8150 - RNA, 21 nt, synthetic construct
  source 1..21: mol_type = other RNA
gggcccctatgtccacttcag

SEQ ID NO: 8151 - RNA, 21 nt, synthetic construct
  source 1..21: mol_type = other RNA
gggcccgggttggaggaagaa

SEQ ID NO: 8152 - RNA, 21 nt, synthetic construct
  source 1..21: mol_type = other RNA
ggggcccgggttggaggaaga

SEQ ID NO: 8153 - RNA, 21 nt, synthetic construct
  source 1..21: mol_type = other RNA
ggggtccgagagctcagctag

SEQ ID NO: 8154 - RNA, 21 nt, synthetic construct
  source 1..21: mol_type = other RNA
gggtccgagagctcagctagt

SEQ ID NO: 8155 - RNA, 21 nt, synthetic construct
  source 1..21: mol_type = other RNA
gggttggaggaagaagactag

SEQ ID NO: 8156 - RNA, 21 nt, synthetic construct
  source 1..21: mol_type = other RNA
ggtccgagagctcagctagtc

SEQ ID NO: 8157 - RNA, 21 nt, synthetic construct
  source 1..21: mol_type = other RNA
ggttggaggaagaagactagc

SEQ ID NO: 8158 - RNA, 21 nt, synthetic construct
  source 1..21: mol_type = other RNA
gtcatggcatcttccaggggt

SEQ ID NO: 8159 - RNA, 21 nt, synthetic construct
  source 1..21: mol_type = other RNA
gtccgagagctcagctagtct

SEQ ID NO: 8160 - RNA, 21 nt, synthetic construct
  source 1..21: mol_type = other RNA
gtcctgaagtggacatagggg

SEQ ID NO: 8161 - RNA, 21 nt, synthetic construct
  source 1..21: mol_type = other RNA
gtcttcttcctccaacccggg

SEQ ID NO: 8162 - RNA, 21 nt, synthetic construct
  source 1..21: mol_type = other RNA
gtggacataggggcccgggtt

SEQ ID NO: 8163 - RNA, 21 nt, synthetic construct
  source 1..21: mol_type = other RNA
gttggaggaagaagactagct

SEQ ID NO: 8164 - RNA, 21 nt, synthetic construct
  source 1..21: mol_type = other RNA
tagctgagctctcggacccct

SEQ ID NO: 8165 - RNA, 21 nt, synthetic construct
  source 1..21: mol_type = other RNA
taggggcccgggttggaggaa

SEQ ID NO: 8166 - RNA, 21 nt, synthetic construct
  source 1..21: mol_type = other RNA
tagtcttcttcctccaacccg

SEQ ID NO: 8167 - RNA, 21 nt, synthetic construct
  source 1..21: mol_type = other RNA
tcagctagtcttcttcctcca

SEQ ID NO: 8168 - RNA, 21 nt, synthetic construct
  source 1..21: mol_type = other RNA
tcatggcatcttccaggggtc

SEQ ID NO: 8169 - RNA, 21 nt, synthetic construct
  source 1..21: mol_type = other RNA
tccaacccgggcccctatgtc

SEQ ID NO: 8170 - RNA, 21 nt, synthetic construct
  source 1..21: mol_type = other RNA
tccagccccctgtcatggcat

SEQ ID NO: 8171 - RNA, 21 nt, synthetic construct
  source 1..21: mol_type = other RNA
tccaggggtccgagagctcag

SEQ ID NO: 8172 - RNA, 21 nt, synthetic construct
  source 1..21: mol_type = other RNA
tccgagagctcagctagtctt

SEQ ID NO: 8173 - RNA, 21 nt, synthetic construct
  source 1..21: mol_type = other RNA
tcctccaacccgggcccctat

SEQ ID NO: 8174 - RNA, 21 nt, synthetic construct
  source 1..21: mol_type = other RNA
tcctgaagtggacataggggc

SEQ ID NO: 8175 - RNA, 21 nt, synthetic construct
  source 1..21: mol_type = other RNA
tcggacccctggaagatgcca

SEQ ID NO: 8176 - RNA, 21 nt, synthetic construct
  source 1..21: mol_type = other RNA
tctcggacccctggaagatgc

SEQ ID NO: 8177 - RNA, 21 nt, synthetic construct
  source 1..21: mol_type = other RNA
tcttccaggggtccgagagct

SEQ ID NO: 8178 - RNA, 21 nt, synthetic construct
  source 1..21: mol_type = other RNA
tcttcctccaacccgggcccc

SEQ ID NO: 8179 - RNA, 21 nt, synthetic construct
  source 1..21: mol_type = other RNA
tcttcttcctccaacccgggc

SEQ ID NO: 8180 - RNA, 21 nt, synthetic construct
  source 1..21: mol_type = other RNA
tgaagtggacataggggcccg

SEQ ID NO: 8181 - RNA, 21 nt, synthetic construct
  source 1..21: mol_type = other RNA
tgagctctcggacccctggaa

SEQ ID NO: 8182 - RNA, 21 nt, synthetic construct
  source 1..21: mol_type = other RNA
tgctgtcctgaagtggacata

SEQ ID NO: 8183 - RNA, 21 nt, synthetic construct
  source 1..21: mol_type = other RNA
tggacataggggcccgggttg

SEQ ID NO: 8184 - RNA, 21 nt, synthetic construct
  source 1..21: mol_type = other RNA
tggaggaagaagactagctga

SEQ ID NO: 8185 - RNA, 21 nt, synthetic construct
  source 1..21: mol_type = other RNA
tggcatcttccaggggtccga

SEQ ID NO: 8186 - RNA, 21 nt, synthetic construct
  source 1..21: mol_type = other RNA
tgtcatggcatcttccagggg

SEQ ID NO: 8187 - RNA, 21 nt, synthetic construct
  source 1..21: mol_type = other RNA
tgtcctgaagtggacataggg

SEQ ID NO: 8188 - RNA, 21 nt, synthetic construct
  source 1..21: mol_type = other RNA
ttccagccccctgtcatggca

SEQ ID NO: 8189 - RNA, 21 nt, synthetic construct
  source 1..21: mol_type = other RNA
ttccaggggtccgagagctca

SEQ ID NO: 8190 - RNA, 21 nt, synthetic construct
  source 1..21: mol_type = other RNA
ttcctccaacccgggccccta

SEQ ID NO: 8191 - RNA, 21 nt, synthetic construct
  source 1..21: mol_type = other RNA
ttcttcctccaacccgggccc

SEQ ID NO: 8192 - RNA, 21 nt, synthetic construct
  source 1..21: mol_type = other RNA
ttggaggaagaagactagctg

SEQ ID NO: 8193 - RNA, 22 nt, synthetic construct
  source 1..22: mol_type = other RNA
aaacatgctgtcctgaagtgga

SEQ ID NO: 8194 - RNA, 22 nt, synthetic construct
  source 1..22: mol_type = other RNA
aacatgctgtcctgaagtggac

SEQ ID NO: 8195 - RNA, 22 nt, synthetic construct
  source 1..22: mol_type = other RNA
aacccgggcccctatgtccact

SEQ ID NO: 8196 - RNA, 22 nt, synthetic construct
  source 1..22: mol_type = other RNA
aagaagactagctgagctctcg

SEQ ID NO: 8197 - RNA, 22 nt, synthetic construct
  source 1..22: mol_type = other RNA
aagactagctgagctctcggac

SEQ ID NO: 8198 - RNA, 22 nt, synthetic construct
  source 1..22: mol_type = other RNA
aagtggacataggggcccgggt

SEQ ID NO: 8199 - RNA, 22 nt, synthetic construct
  source 1..22: mol_type = other RNA
acataggggcccgggttggagg

SEQ ID NO: 8200 - RNA, 22 nt, synthetic construct
  source 1..22: mol_type = other RNA
acatgctgtcctgaagtggaca

SEQ ID NO: 8201 - RNA, 22 nt, synthetic construct
  source 1..22: mol_type = other RNA
acccctggaagatgccatgaca

SEQ ID NO: 8202 - RNA, 22 nt, synthetic construct
  source 1..22: mol_type = other RNA
acccgggcccctatgtccactt

SEQ ID NO: 8203 - RNA, 22 nt, synthetic construct
  source 1..22: mol_type = other RNA
actagctgagctctcggacccc

SEQ ID NO: 8204 - RNA, 22 nt, synthetic construct
  source 1..22: mol_type = other RNA
agaagactagctgagctctcgg

SEQ ID NO: 8205 - RNA, 22 nt, synthetic construct
  source 1..22: mol_type = other RNA
agactagctgagctctcggacc

SEQ ID NO: 8206 - RNA, 22 nt, synthetic construct
  source 1..22: mol_type = other RNA
agagctcagctagtcttcttcc

SEQ ID NO: 8207 - RNA, 22 nt, synthetic construct
  source 1..22: mol_type = other RNA
agccccctgtcatggcatcttc

SEQ ID NO: 8208 - RNA, 22 nt, synthetic construct
  source 1..22: mol_type = other RNA
agctagtcttcttcctccaacc

SEQ ID NO: 8209 - RNA, 22 nt, synthetic construct
  source 1..22: mol_type = other RNA
agctcagctagtcttcttcctc

SEQ ID NO: 8210 - RNA, 22 nt, synthetic construct
  source 1..22: mol_type = other RNA
agctctcggacccctggaagat

SEQ ID NO: 8211 - RNA, 22 nt, synthetic construct
  source 1..22: mol_type = other RNA
agctgagctctcggacccctgg

SEQ ID NO: 8212 - RNA, 22 nt, synthetic construct
  source 1..22: mol_type = other RNA
aggaagaagactagctgagctc

SEQ ID NO: 8213 - RNA, 22 nt, synthetic construct
  source 1..22: mol_type = other RNA
aggggcccgggttggaggaaga

SEQ ID NO: 8214 - RNA, 22 nt, synthetic construct
  source 1..22: mol_type = other RNA
aggggtccgagagctcagctag

SEQ ID NO: 8215 - RNA, 22 nt, synthetic construct
  source 1..22: mol_type = other RNA
agtcttcttcctccaacccggg

SEQ ID NO: 8216 - RNA, 22 nt, synthetic construct
  source 1..22: mol_type = other RNA
agtggacataggggcccgggtt

SEQ ID NO: 8217 - RNA, 22 nt, synthetic construct
  source 1..22: mol_type = other RNA
ataggggcccgggttggaggaa

SEQ ID NO: 8218 - RNA, 22 nt, synthetic construct
  source 1..22: mol_type = other RNA
atcttccaggggtccgagagct

SEQ ID NO: 8219 - RNA, 22 nt, synthetic construct
  source 1..22: mol_type = other RNA
atgctgtcctgaagtggacata

SEQ ID NO: 8220 - RNA, 22 nt, synthetic construct
  source 1..22: mol_type = other RNA
atggcatcttccaggggtccga

SEQ ID NO: 8221 - RNA, 22 nt, synthetic construct
  source 1..22: mol_type = other RNA
caaacatgctgtcctgaagtgg

SEQ ID NO: 8222 - RNA, 22 nt, synthetic construct
  source 1..22: mol_type = other RNA
caacccgggcccctatgtccac

SEQ ID NO: 8223 - RNA, 22 nt, synthetic construct
  source 1..22: mol_type = other RNA
cagccccctgtcatggcatctt

SEQ ID NO: 8224 - RNA, 22 nt, synthetic construct
  source 1..22: mol_type = other RNA
cagctagtcttcttcctccaac

SEQ ID NO: 8225 - RNA, 22 nt, synthetic construct
  source 1..22: mol_type = other RNA
caggggtccgagagctcagcta

SEQ ID NO: 8226 - RNA, 22 nt, synthetic construct
  source 1..22: mol_type = other RNA
cataggggcccgggttggagga

SEQ ID NO: 8227 - RNA, 22 nt, synthetic construct
  source 1..22: mol_type = other RNA
catcttccaggggtccgagagc

SEQ ID NO: 8228 - RNA, 22 nt, synthetic construct
  source 1..22: mol_type = other RNA
catgctgtcctgaagtggacat

SEQ ID NO: 8229 - RNA, 22 nt, synthetic construct
  source 1..22: mol_type = other RNA
catggcatcttccaggggtccg

SEQ ID NO: 8230 - RNA, 22 nt, synthetic construct
  source 1..22: mol_type = other RNA
ccaacccgggcccctatgtcca

SEQ ID NO: 8231 - RNA, 22 nt, synthetic construct
  source 1..22: mol_type = other RNA
ccagccccctgtcatggcatct

SEQ ID NO: 8232 - RNA, 22 nt, synthetic construct
  source 1..22: mol_type = other RNA
ccaggggtccgagagctcagct

SEQ ID NO: 8233 - RNA, 22 nt, synthetic construct
  source 1..22: mol_type = other RNA
ccccctgtcatggcatcttcca

SEQ ID NO: 8234 - RNA, 22 nt, synthetic construct
  source 1..22: mol_type = other RNA
cccctatgtccacttcaggaca

SEQ ID NO: 8235 - RNA, 22 nt, synthetic construct
  source 1..22: mol_type = other RNA
cccctggaagatgccatgacag

SEQ ID NO: 8236 - RNA, 22 nt, synthetic construct
  source 1..22: mol_type = other RNA
cccctgtcatggcatcttccag

SEQ ID NO: 8237 - RNA, 22 nt, synthetic construct
  source 1..22: mol_type = other RNA
cccgggcccctatgtccacttc

SEQ ID NO: 8238 - RNA, 22 nt, synthetic construct
  source 1..22: mol_type = other RNA
cccgggttggaggaagaagact

SEQ ID NO: 8239 - RNA, 22 nt, synthetic construct
  source 1..22: mol_type = other RNA
ccctatgtccacttcaggacag

SEQ ID NO: 8240 - RNA, 22 nt, synthetic construct
  source 1..22: mol_type = other RNA
ccctggaagatgccatgacagg

SEQ ID NO: 8241 - RNA, 22 nt, synthetic construct
  source 1..22: mol_type = other RNA
ccctgtcatggcatcttccagg

SEQ ID NO: 8242 - RNA, 22 nt, synthetic construct
  source 1..22: mol_type = other RNA
ccgagagctcagctagtcttct

SEQ ID NO: 8243 - RNA, 22 nt, synthetic construct
  source 1..22: mol_type = other RNA
ccgggcccctatgtccacttca

SEQ ID NO: 8244 - RNA, 22 nt, synthetic construct
  source 1..22: mol_type = other RNA
ccgggttggaggaagaagacta

SEQ ID NO: 8245 - RNA, 22 nt, synthetic construct
  source 1..22: mol_type = other RNA
cctccaacccgggcccctatgt

SEQ ID NO: 8246 - RNA, 22 nt, synthetic construct
  source 1..22: mol_type = other RNA
cctgaagtggacataggggccc

SEQ ID NO: 8247 - RNA, 22 nt, synthetic construct
  source 1..22: mol_type = other RNA
cctggaagatgccatgacaggg

SEQ ID NO: 8248 - RNA, 22 nt, synthetic construct
  source 1..22: mol_type = other RNA
cctgtcatggcatcttccaggg

SEQ ID NO: 8249 - RNA, 22 nt, synthetic construct
  source 1..22: mol_type = other RNA
cgagagctcagctagtcttctt

SEQ ID NO: 8250 - RNA, 22 nt, synthetic construct
  source 1..22: mol_type = other RNA
cggacccctggaagatgccatg

SEQ ID NO: 8251 - RNA, 22 nt, synthetic construct
  source 1..22: mol_type = other RNA
cgggcccctatgtccacttcag

SEQ ID NO: 8252 - RNA, 22 nt, synthetic construct
  source 1..22: mol_type = other RNA
cgggttggaggaagaagactag

SEQ ID NO: 8253 - RNA, 22 nt, synthetic construct
  source 1..22: mol_type = other RNA
ctagctgagctctcggacccct

SEQ ID NO: 8254 - RNA, 22 nt, synthetic construct
  source 1..22: mol_type = other RNA
ctagtcttcttcctccaacccg

SEQ ID NO: 8255 - RNA, 22 nt, synthetic construct
  source 1..22: mol_type = other RNA
ctcagctagtcttcttcctcca

SEQ ID NO: 8256 - RNA, 22 nt, synthetic construct
  source 1..22: mol_type = other RNA
ctccaacccgggcccctatgtc

SEQ ID NO: 8257 - RNA, 22 nt, synthetic construct
  source 1..22: mol_type = other RNA
ctcggacccctggaagatgcca

SEQ ID NO: 8258 - RNA, 22 nt, synthetic construct
  source 1..22: mol_type = other RNA
ctctcggacccctggaagatgc

SEQ ID NO: 8259 - RNA, 22 nt, synthetic construct
  source 1..22: mol_type = other RNA
ctgaagtggacataggggcccg

SEQ ID NO: 8260 - RNA, 22 nt, synthetic construct
  source 1..22: mol_type = other RNA
ctgagctctcggacccctggaa

SEQ ID NO: 8261 - RNA, 22 nt, synthetic construct
  source 1..22: mol_type = other RNA
ctgtcatggcatcttccagggg

SEQ ID NO: 8262 - RNA, 22 nt, synthetic construct
  source 1..22: mol_type = other RNA
ctgtcctgaagtggacataggg

SEQ ID NO: 8263 - RNA, 22 nt, synthetic construct
  source 1..22: mol_type = other RNA
cttccaggggtccgagagctca

SEQ ID NO: 8264 - RNA, 22 nt, synthetic construct
  source 1..22: mol_type = other RNA
cttcctccaacccgggccccta

SEQ ID NO: 8265 - RNA, 22 nt, synthetic construct
  source 1..22: mol_type = other RNA
cttcttcctccaacccgggccc

SEQ ID NO: 8266 - RNA, 22 nt, synthetic construct
  source 1..22: mol_type = other RNA
gaagaagactagctgagctctc

SEQ ID NO: 8267 - RNA, 22 nt, synthetic construct
  source 1..22: mol_type = other RNA
gaagactagctgagctctcgga

SEQ ID NO: 8268 - RNA, 22 nt, synthetic construct
  source 1..22: mol_type = other RNA
gaagtggacataggggcccggg

SEQ ID NO: 8269 - RNA, 22 nt, synthetic construct
  source 1..22: mol_type = other RNA
gacataggggcccgggttggag

SEQ ID NO: 8270 - RNA, 22 nt, synthetic construct
  source 1..22: mol_type = other RNA
gacccctggaagatgccatgac

SEQ ID NO: 8271 - RNA, 22 nt, synthetic construct
  source 1..22: mol_type = other RNA
gactagctgagctctcggaccc

SEQ ID NO: 8272 - RNA, 22 nt, synthetic construct
  source 1..22: mol_type = other RNA
gagagctcagctagtcttcttc

SEQ ID NO: 8273 - RNA, 22 nt, synthetic construct
  source 1..22: mol_type = other RNA
gagctcagctagtcttcttcct

SEQ ID NO: 8274 - RNA, 22 nt, synthetic construct
  source 1..22: mol_type = other RNA
gagctctcggacccctggaaga

SEQ ID NO: 8275 - RNA, 22 nt, synthetic construct
  source 1..22: mol_type = other RNA
gaggaagaagactagctgagct

SEQ ID NO: 8276 - RNA, 22 nt, synthetic construct
  source 1..22: mol_type = other RNA
gcatcttccaggggtccgagag

SEQ ID NO: 8277 - RNA, 22 nt, synthetic construct
  source 1..22: mol_type = other RNA
gccccctgtcatggcatcttcc

SEQ ID NO: 8278 - RNA, 22 nt, synthetic construct
  source 1..22: mol_type = other RNA
gcccctatgtccacttcaggac

SEQ ID NO: 8279 - RNA, 22 nt, synthetic construct
  source 1..22: mol_type = other RNA
gcccgggttggaggaagaagac

SEQ ID NO: 8280 - RNA, 22 nt, synthetic construct
  source 1..22: mol_type = other RNA
gctagtcttcttcctccaaccc

SEQ ID NO: 8281 - RNA, 22 nt, synthetic construct
  source 1..22: mol_type = other RNA
gctcagctagtcttcttcctcc

SEQ ID NO: 8282 - RNA, 22 nt, synthetic construct
  source 1..22: mol_type = other RNA
gctctcggacccctggaagatg

SEQ ID NO: 8283 - RNA, 22 nt, synthetic construct
  source 1..22: mol_type = other RNA
gctgagctctcggacccctgga

SEQ ID NO: 8284 - RNA, 22 nt, synthetic construct
  source 1..22: mol_type = other RNA
gctgtcctgaagtggacatagg

SEQ ID NO: 8285 - RNA, 22 nt, synthetic construct
  source 1..22: mol_type = other RNA
ggaagaagactagctgagctct

SEQ ID NO: 8286 - RNA, 22 nt, synthetic construct
  source 1..22: mol_type = other RNA
ggacataggggcccgggttgga

SEQ ID NO: 8287 - RNA, 22 nt, synthetic construct
  source 1..22: mol_type = other RNA
ggacccctggaagatgccatga

SEQ ID NO: 8288 - RNA, 22 nt, synthetic construct
  source 1..22: mol_type = other RNA
ggaggaagaagactagctgagc

SEQ ID NO: 8289 - RNA, 22 nt, synthetic construct
  source 1..22: mol_type = other RNA
ggcatcttccaggggtccgaga

SEQ ID NO: 8290 - RNA, 22 nt, synthetic construct
  source 1..22: mol_type = other RNA
ggcccctatgtccacttcagga

SEQ ID NO: 8291 - RNA, 22 nt, synthetic construct
  source 1..22: mol_type = other RNA
ggcccgggttggaggaagaaga

SEQ ID NO: 8292 - RNA, 22 nt, synthetic construct
  source 1..22: mol_type = other RNA
gggcccctatgtccacttcagg

SEQ ID NO: 8293 - RNA, 22 nt, synthetic construct
  source 1..22: mol_type = other RNA
gggcccgggttggaggaagaag

SEQ ID NO: 8294 - RNA, 22 nt, synthetic construct
  source 1..22: mol_type = other RNA
ggggcccgggttggaggaagaa

SEQ ID NO: 8295 - RNA, 22 nt, synthetic construct
  source 1..22: mol_type = other RNA
ggggtccgagagctcagctagt

SEQ ID NO: 8296 - RNA, 22 nt, synthetic construct
  source 1..22: mol_type = other RNA
gggtccgagagctcagctagtc

SEQ ID NO: 8297 - RNA, 22 nt, synthetic construct
  source 1..22: mol_type = other RNA
gggttggaggaagaagactagc

SEQ ID NO: 8298 - RNA, 22 nt, synthetic construct
  source 1..22: mol_type = other RNA
ggtccgagagctcagctagtct

SEQ ID NO: 8299 - RNA, 22 nt, synthetic construct
  source 1..22: mol_type = other RNA
ggttggaggaagaagactagct

SEQ ID NO: 8300 - RNA, 22 nt, synthetic construct
  source 1..22: mol_type = other RNA
gtcatggcatcttccaggggtc

SEQ ID NO: 8301 - RNA, 22 nt, synthetic construct
  source 1..22: mol_type = other RNA
gtccgagagctcagctagtctt

SEQ ID NO: 8302 - RNA, 22 nt, synthetic construct
  source 1..22: mol_type = other RNA
gtcctgaagtggacataggggc

SEQ ID NO: 8303 - RNA, 22 nt, synthetic construct
  source 1..22: mol_type = other RNA
gtcttcttcctccaacccgggc

SEQ ID NO: 8304 - RNA, 22 nt, synthetic construct
  source 1..22: mol_type = other RNA
gtggacataggggcccgggttg

SEQ ID NO: 8305 - RNA, 22 nt, synthetic construct
  source 1..22: mol_type = other RNA
gttggaggaagaagactagctg

SEQ ID NO: 8306 - RNA, 22 nt, synthetic construct
  source 1..22: mol_type = other RNA
tagctgagctctcggacccctg

SEQ ID NO: 8307 - RNA, 22 nt, synthetic construct
  source 1..22: mol_type = other RNA
taggggcccgggttggaggaag

SEQ ID NO: 8308 - RNA, 22 nt, synthetic construct
  source 1..22: mol_type = other RNA
tagtcttcttcctccaacccgg

SEQ ID NO: 8309 - RNA, 22 nt, synthetic construct
  source 1..22: mol_type = other RNA
tcagctagtcttcttcctccaa

SEQ ID NO: 8310 - RNA, 22 nt, synthetic construct
  source 1..22: mol_type = other RNA
tcatggcatcttccaggggtcc

SEQ ID NO: 8311 - RNA, 22 nt, synthetic construct
  source 1..22: mol_type = other RNA
tccaacccgggcccctatgtcc

SEQ ID NO: 8312 - RNA, 22 nt, synthetic construct
  source 1..22: mol_type = other RNA
tccagccccctgtcatggcatc

SEQ ID NO: 8313 - RNA, 22 nt, synthetic construct
  source 1..22: mol_type = other RNA
tccaggggtccgagagctcagc

SEQ ID NO: 8314 - RNA, 22 nt, synthetic construct
  source 1..22: mol_type = other RNA
tccgagagctcagctagtcttc

SEQ ID NO: 8315 - RNA, 22 nt, synthetic construct
  source 1..22: mol_type = other RNA
tcctccaacccgggcccctatg

SEQ ID NO: 8316 - RNA, 22 nt, synthetic construct
  source 1..22: mol_type = other RNA
tcctgaagtggacataggggcc

SEQ ID NO: 8317 - RNA, 22 nt, synthetic construct
  source 1..22: mol_type = other RNA
tcggacccctggaagatgccat

SEQ ID NO: 8318 - RNA, 22 nt, synthetic construct
  source 1..22: mol_type = other RNA
tctcggacccctggaagatgcc

SEQ ID NO: 8319 - RNA, 22 nt, synthetic construct
  source 1..22: mol_type = other RNA
tcttccaggggtccgagagctc

SEQ ID NO: 8320 - RNA, 22 nt, synthetic construct
  source 1..22: mol_type = other RNA
tcttcctccaacccgggcccct

SEQ ID NO: 8321 - RNA, 22 nt, synthetic construct
  source 1..22: mol_type = other RNA
tcttcttcctccaacccgggcc

SEQ ID NO: 8322 - RNA, 22 nt, synthetic construct
  source 1..22: mol_type = other RNA
tgaagtggacataggggcccgg

SEQ ID NO: 8323 - RNA, 22 nt, synthetic construct
  source 1..22: mol_type = other RNA
tgagctctcggacccctggaag

SEQ ID NO: 8324 - RNA, 22 nt, synthetic construct
  source 1..22: mol_type = other RNA
tgctgtcctgaagtggacatag

SEQ ID NO: 8325 - RNA, 22 nt, synthetic construct
  source 1..22: mol_type = other RNA
tggacataggggcccgggttgg

SEQ ID NO: 8326 - RNA, 22 nt, synthetic construct
  source 1..22: mol_type = other RNA
tggaggaagaagactagctgag

SEQ ID NO: 8327 - RNA, 22 nt, synthetic construct
  source 1..22: mol_type = other RNA
tggcatcttccaggggtccgag

SEQ ID NO: 8328 - RNA, 22 nt, synthetic construct
  source 1..22: mol_type = other RNA
tgtcatggcatcttccaggggt

SEQ ID NO: 8329 - RNA, 22 nt, synthetic construct
  source 1..22: mol_type = other RNA
tgtcctgaagtggacatagggg

SEQ ID NO: 8330 - RNA, 22 nt, synthetic construct
  source 1..22: mol_type = other RNA
ttccagccccctgtcatggcat

SEQ ID NO: 8331 - RNA, 22 nt, synthetic construct
  source 1..22: mol_type = other RNA
ttccaggggtccgagagctcag

SEQ ID NO: 8332 - RNA, 22 nt, synthetic construct
  source 1..22: mol_type = other RNA
ttcctccaacccgggcccctat

SEQ ID NO: 8333 - RNA, 22 nt, synthetic construct
  source 1..22: mol_type = other RNA
ttcttcctccaacccgggcccc

SEQ ID NO: 8334 - RNA, 22 nt, synthetic construct
  source 1..22: mol_type = other RNA
ttggaggaagaagactagctga

SEQ ID NO: 8335 - RNA, 20 nt, synthetic construct
  source 1..20: mol_type = other RNA
aaaccttagaggttctggca

SEQ ID NO: 8336 - RNA, 20 nt, synthetic construct
  source 1..20: mol_type = other RNA
aacctctaaggtttgcttac

SEQ ID NO: 8337 - RNA, 20 nt, synthetic construct
  source 1..20: mol_type = other RNA
aaccttagaggttctggcaa

SEQ ID NO: 8338 - RNA, 20 nt, synthetic construct
  source 1..20: mol_type = other RNA
aagcaaaccttagaggttct

SEQ ID NO: 8339 - RNA, 20 nt, synthetic construct
  source 1..20: mol_type = other RNA
aagctctccctcccaggatc

SEQ ID NO: 8340 - RNA, 20 nt, synthetic construct
  source 1..20: mol_type = other RNA
aaggagagagatggctccag

SEQ ID NO: 8341 - RNA, 20 nt, synthetic construct
  source 1..20: mol_type = other RNA
aaggtttgcttacgatggag

SEQ ID NO: 8342 - RNA, 20 nt, synthetic construct
  source 1..20: mol_type = other RNA
acacacccccatttcctgga

SEQ ID NO: 8343 - RNA, 20 nt, synthetic construct
  source 1..20: mol_type = other RNA
acacccccatttcctggagc

SEQ ID NO: 8344 - RNA, 20 nt, synthetic construct
  source 1..20: mol_type = other RNA
acccccatttcctggagcca

SEQ ID NO: 8345 - RNA, 20 nt, synthetic construct
  source 1..20: mol_type = other RNA
acctctaaggtttgcttacg

SEQ ID NO: 8346 - RNA, 20 nt, synthetic construct
  source 1..20: mol_type = other RNA
accttagaggttctggcaag

SEQ ID NO: 8347 - RNA, 20 nt, synthetic construct
  source 1..20: mol_type = other RNA
acgatggagccagagaggat

SEQ ID NO: 8348 - RNA, 20 nt, synthetic construct
  source 1..20: mol_type = other RNA
agaacctctaaggtttgctt

SEQ ID NO: 8349 - RNA, 20 nt, synthetic construct
  source 1..20: mol_type = other RNA
agagagatggctccaggaaa

SEQ ID NO: 8350 - RNA, 20 nt, synthetic construct
  source 1..20: mol_type = other RNA
agagaggatcctgggaggga

SEQ ID NO: 8351 - RNA, 20 nt, synthetic construct
  source 1..20: mol_type = other RNA
agagatggctccaggaaatg

SEQ ID NO: 8352 - RNA, 20 nt, synthetic construct
  source 1..20: mol_type = other RNA
agaggttctggcaaggagag

SEQ ID NO: 8353 - RNA, 20 nt, synthetic construct
  source 1..20: mol_type = other RNA
agatggctccaggaaatggg

SEQ ID NO: 8354 - RNA, 20 nt, synthetic construct
  source 1..20: mol_type = other RNA
agcaaaccttagaggttctg

SEQ ID NO: 8355 - RNA, 20 nt, synthetic construct
  source 1..20: mol_type = other RNA
agccagagaggatcctggga

SEQ ID NO: 8356 - RNA, 20 nt, synthetic construct
  source 1..20: mol_type = other RNA
agccatctctctccttgcca

SEQ ID NO: 8357 - RNA, 20 nt, synthetic construct
  source 1..20: mol_type = other RNA
agctctccctcccaggatcc

SEQ ID NO: 8358 - RNA, 20 nt, synthetic construct
  source 1..20: mol_type = other RNA
aggagagagatggctccagg

SEQ ID NO: 8359 - RNA, 20 nt, synthetic construct
  source 1..20: mol_type = other RNA
aggatcctctctggctccat

SEQ ID NO: 8360 - RNA, 20 nt, synthetic construct
  source 1..20: mol_type = other RNA
aggttctggcaaggagagag

SEQ ID NO: 8361 - RNA, 20 nt, synthetic construct
  source 1..20: mol_type = other RNA
aggtttgcttacgatggagc

SEQ ID NO: 8362 - RNA, 20 nt, synthetic construct
  source 1..20: mol_type = other RNA
atcctctctggctccatcgt

SEQ ID NO: 8363 - RNA, 20 nt, synthetic construct
  source 1..20: mol_type = other RNA
atcgtaagcaaaccttagag

SEQ ID NO: 8364 - RNA, 20 nt, synthetic construct
  source 1..20: mol_type = other RNA
atctctctccttgccagaac

SEQ ID NO: 8365 - RNA, 20 nt, synthetic construct
  source 1..20: mol_type = other RNA
atggagccagagaggatcct

SEQ ID NO: 8366 - RNA, 20 nt, synthetic construct
  source 1..20: mol_type = other RNA
atggctccaggaaatggggg

SEQ ID NO: 8367 - RNA, 20 nt, synthetic construct
  source 1..20: mol_type = other RNA
atttcctggagccatctctc

SEQ ID NO: 8368 - RNA, 20 nt, synthetic construct
  source 1..20: mol_type = other RNA
caaaccttagaggttctggc

SEQ ID NO: 8369 - RNA, 20 nt, synthetic construct
  source 1..20: mol_type = other RNA
caagctctccctcccaggat

SEQ ID NO: 8370 - RNA, 20 nt, synthetic construct
  source 1..20: mol_type = other RNA
caaggagagagatggctcca

SEQ ID NO: 8371 - RNA, 20 nt, synthetic construct
  source 1..20: mol_type = other RNA
cacacccccatttcctggag

SEQ ID NO: 8372 - RNA, 20 nt, synthetic construct
  source 1..20: mol_type = other RNA
cacccccatttcctggagcc

SEQ ID NO: 8373 - RNA, 20 nt, synthetic construct
  source 1..20: mol_type = other RNA
cagaacctctaaggtttgct

SEQ ID NO: 8374 - RNA, 20 nt, synthetic construct
  source 1..20: mol_type = other RNA
cagagaggatcctgggaggg

SEQ ID NO: 8375 - RNA, 20 nt, synthetic construct
  source 1..20: mol_type = other RNA
caggatcctctctggctcca

SEQ ID NO: 8376 - RNA, 20 nt, synthetic construct
  source 1..20: mol_type = other RNA
catcgtaagcaaaccttaga

SEQ ID NO: 8377 - RNA, 20 nt, synthetic construct
  source 1..20: mol_type = other RNA
catctctctccttgccagaa

SEQ ID NO: 8378 - RNA, 20 nt, synthetic construct
  source 1..20: mol_type = other RNA
catttcctggagccatctct

SEQ ID NO: 8379 - RNA, 20 nt, synthetic construct
  source 1..20: mol_type = other RNA
ccaagctctccctcccagga

SEQ ID NO: 8380 - RNA, 20 nt, synthetic construct
  source 1..20: mol_type = other RNA
ccagaacctctaaggtttgc

SEQ ID NO: 8381 - RNA, 20 nt, synthetic construct
  source 1..20: mol_type = other RNA
ccagagaggatcctgggagg

SEQ ID NO: 8382 - RNA, 20 nt, synthetic construct
  source 1..20: mol_type = other RNA
ccaggatcctctctggctcc

SEQ ID NO: 8383 - RNA, 20 nt, synthetic construct
  source 1..20: mol_type = other RNA
ccatcgtaagcaaaccttag

SEQ ID NO: 8384 - RNA, 20 nt, synthetic construct
  source 1..20: mol_type = other RNA
ccatctctctccttgccaga

SEQ ID NO: 8385 - RNA, 20 nt, synthetic construct
  source 1..20: mol_type = other RNA
ccatttcctggagccatctc

SEQ ID NO: 8386 - RNA, 20 nt, synthetic construct
  source 1..20: mol_type = other RNA
cccaggatcctctctggctc

SEQ ID NO: 8387 - RNA, 20 nt, synthetic construct
  source 1..20: mol_type = other RNA
cccatttcctggagccatct

SEQ ID NO: 8388 - RNA, 20 nt, synthetic construct
  source 1..20: mol_type = other RNA
ccccatttcctggagccatc

SEQ ID NO: 8389 - RNA, 20 nt, synthetic construct
  source 1..20: mol_type = other RNA
cccccatttcctggagccat

SEQ ID NO: 8390 - RNA, 20 nt, synthetic construct
  source 1..20: mol_type = other RNA
ccctcccaggatcctctctg

SEQ ID NO: 8391 - RNA, 20 nt, synthetic construct
  source 1..20: mol_type = other RNA
cctcccaggatcctctctgg

SEQ ID NO: 8392 - RNA, 20 nt, synthetic construct
  source 1..20: mol_type = other RNA
cctctaaggtttgcttacga

SEQ ID NO: 8393 - RNA, 20 nt, synthetic construct
  source 1..20: mol_type = other RNA
cctctctggctccatcgtaa

SEQ ID NO: 8394 - RNA, 20 nt, synthetic construct
  source 1..20: mol_type = other RNA
cctggagccatctctctcct

SEQ ID NO: 8395 - RNA, 20 nt, synthetic construct
  source 1..20: mol_type = other RNA
ccttagaggttctggcaagg

SEQ ID NO: 8396 - RNA, 20 nt, synthetic construct
  source 1..20: mol_type = other RNA
ccttgccagaacctctaagg

SEQ ID NO: 8397 - RNA, 20 nt, synthetic construct
  source 1..20: mol_type = other RNA
cgatggagccagagaggatc

SEQ ID NO: 8398 - RNA, 20 nt, synthetic construct
  source 1..20: mol_type = other RNA
cgtaagcaaaccttagaggt

SEQ ID NO: 8399 - RNA, 20 nt, synthetic construct
  source 1..20: mol_type = other RNA
ctaaggtttgcttacgatgg

SEQ ID NO: 8400 - RNA, 20 nt, synthetic construct
  source 1..20: mol_type = other RNA
ctccatcgtaagcaaacctt

SEQ ID NO: 8401 - RNA, 20 nt, synthetic construct
  source 1..20: mol_type = other RNA
ctcccaggatcctctctggc

SEQ ID NO: 8402 - RNA, 20 nt, synthetic construct
  source 1..20: mol_type = other RNA
ctccctcccaggatcctctc

SEQ ID NO: 8403 - RNA, 20 nt, synthetic construct
  source 1..20: mol_type = other RNA
ctccttgccagaacctctaa

SEQ ID NO: 8404 - RNA, 20 nt, synthetic construct
  source 1..20: mol_type = other RNA
ctctaaggtttgcttacgat

SEQ ID NO: 8405 - RNA, 20 nt, synthetic construct
  source 1..20: mol_type = other RNA
ctctccctcccaggatcctc

SEQ ID NO: 8406 - RNA, 20 nt, synthetic construct
  source 1..20: mol_type = other RNA
ctctccttgccagaacctct

SEQ ID NO: 8407 - RNA, 20 nt, synthetic construct
  source 1..20: mol_type = other RNA
ctctctccttgccagaacct

SEQ ID NO: 8408 - RNA, 20 nt, synthetic construct
  source 1..20: mol_type = other RNA
ctctctggctccatcgtaag

SEQ ID NO: 8409 - RNA, 20 nt, synthetic construct
  source 1..20: mol_type = other RNA
ctctggctccatcgtaagca

SEQ ID NO: 8410 - RNA, 20 nt, synthetic construct
  source 1..20: mol_type = other RNA
ctggagccatctctctcctt

SEQ ID NO: 8411 - RNA, 20 nt, synthetic construct
  source 1..20: mol_type = other RNA
ctggcaaggagagagatggc

SEQ ID NO: 8412 - RNA, 20 nt, synthetic construct
  source 1..20: mol_type = other RNA
ctggctccatcgtaagcaaa

SEQ ID NO: 8413 - RNA, 20 nt, synthetic construct
  source 1..20: mol_type = other RNA
cttacgatggagccagagag

SEQ ID NO: 8414 - RNA, 20 nt, synthetic construct
  source 1..20: mol_type = other RNA
cttagaggttctggcaagga

SEQ ID NO: 8415 - RNA, 20 nt, synthetic construct
  source 1..20: mol_type = other RNA
cttgccagaacctctaaggt

SEQ ID NO: 8416 - RNA, 20 nt, synthetic construct
  source 1..20: mol_type = other RNA
gaacctctaaggtttgctta

SEQ ID NO: 8417 - RNA, 20 nt, synthetic construct
  source 1..20: mol_type = other RNA
gacacacccccatttcctgg

SEQ ID NO: 8418 - RNA, 20 nt, synthetic construct
  source 1..20: mol_type = other RNA
gagagagatggctccaggaa

SEQ ID NO: 8419 - RNA, 20 nt, synthetic construct
  source 1..20: mol_type = other RNA
gagagatggctccaggaaat

SEQ ID NO: 8420 - RNA, 20 nt, synthetic construct
  source 1..20: mol_type = other RNA
gagatggctccaggaaatgg

SEQ ID NO: 8421 - RNA, 20 nt, synthetic construct
  source 1..20: mol_type = other RNA
gagccagagaggatcctggg

SEQ ID NO: 8422 - RNA, 20 nt, synthetic construct
  source 1..20: mol_type = other RNA
gagccatctctctccttgcc

SEQ ID NO: 8423 - RNA, 20 nt, synthetic construct
  source 1..20: mol_type = other RNA
gaggttctggcaaggagaga

SEQ ID NO: 8424 - RNA, 20 nt, synthetic construct
  source 1..20: mol_type = other RNA
gatcctctctggctccatcg

SEQ ID NO: 8425 - RNA, 20 nt, synthetic construct
  source 1..20: mol_type = other RNA
gatggagccagagaggatcc

SEQ ID NO: 8426 - RNA, 20 nt, synthetic construct
  source 1..20: mol_type = other RNA
gatggctccaggaaatgggg

SEQ ID NO: 8427 - RNA, 20 nt, synthetic construct
  source 1..20: mol_type = other RNA
gcaaaccttagaggttctgg

SEQ ID NO: 8428 - RNA, 20 nt, synthetic construct
  source 1..20: mol_type = other RNA
gcaaggagagagatggctcc

SEQ ID NO: 8429 - RNA, 20 nt, synthetic construct
  source 1..20: mol_type = other RNA
gccagaacctctaaggtttg

SEQ ID NO: 8430 - RNA, 20 nt, synthetic construct
  source 1..20: mol_type = other RNA
gccagagaggatcctgggag

SEQ ID NO: 8431 - RNA, 20 nt, synthetic construct
  source 1..20: mol_type = other RNA
gccatctctctccttgccag

SEQ ID NO: 8432 - RNA, 20 nt, synthetic construct
  source 1..20: mol_type = other RNA
gctccatcgtaagcaaacct

SEQ ID NO: 8433 - RNA, 20 nt, synthetic construct
  source 1..20: mol_type = other RNA
gctctccctcccaggatcct

SEQ ID NO: 8434 - RNA, 20 nt, synthetic construct
  source 1..20: mol_type = other RNA
gcttacgatggagccagaga

SEQ ID NO: 8435 - RNA, 20 nt, synthetic construct
  source 1..20: mol_type = other RNA
ggagagagatggctccagga

SEQ ID NO: 8436 - RNA, 20 nt, synthetic construct
  source 1..20: mol_type = other RNA
ggagccagagaggatcctgg

SEQ ID NO: 8437 - RNA, 20 nt, synthetic construct
  source 1..20: mol_type = other RNA
ggagccatctctctccttgc

SEQ ID NO: 8438 - RNA, 20 nt, synthetic construct
  source 1..20: mol_type = other RNA
ggatcctctctggctccatc

SEQ ID NO: 8439 - RNA, 20 nt, synthetic construct
  source 1..20: mol_type = other RNA
ggcaaggagagagatggctc

SEQ ID NO: 8440 - RNA, 20 nt, synthetic construct
  source 1..20: mol_type = other RNA
ggctccatcgtaagcaaacc

SEQ ID NO: 8441 - RNA, 20 nt, synthetic construct
  source 1..20: mol_type = other RNA
ggttctggcaaggagagaga

SEQ ID NO: 8442 - RNA, 20 nt, synthetic construct
  source 1..20: mol_type = other RNA
ggtttgcttacgatggagcc

SEQ ID NO: 8443 - RNA, 20 nt, synthetic construct
  source 1..20: mol_type = other RNA
gtaagcaaaccttagaggtt

SEQ ID NO: 8444 - RNA, 20 nt, synthetic construct
  source 1..20: mol_type = other RNA
gtgacacacccccatttcct

SEQ ID NO: 8445 - RNA, 20 nt, synthetic construct
  source 1..20: mol_type = other RNA
gttctggcaaggagagagat

SEQ ID NO: 8446 - RNA, 20 nt, synthetic construct
  source 1..20: mol_type = other RNA
gtttgcttacgatggagcca

SEQ ID NO: 8447 - RNA, 20 nt, synthetic construct
  source 1..20: mol_type = other RNA
taagcaaaccttagaggttc

SEQ ID NO: 8448 - RNA, 20 nt, synthetic construct
  source 1..20: mol_type = other RNA
taaggtttgcttacgatgga

SEQ ID NO: 8449 - RNA, 20 nt, synthetic construct
  source 1..20: mol_type = other RNA
tacgatggagccagagagga

SEQ ID NO: 8450 - RNA, 20 nt, synthetic construct
  source 1..20: mol_type = other RNA
tagaggttctggcaaggaga

SEQ ID NO: 8451 - RNA, 20 nt, synthetic construct
  source 1..20: mol_type = other RNA
tccatcgtaagcaaacctta

SEQ ID NO: 8452 - RNA, 20 nt, synthetic construct
  source 1..20: mol_type = other RNA
tcccaggatcctctctggct

SEQ ID NO: 8453 - RNA, 20 nt, synthetic construct
  source 1..20: mol_type = other RNA
tccctcccaggatcctctct

SEQ ID NO: 8454 - RNA, 20 nt, synthetic construct
  source 1..20: mol_type = other RNA
tcctctctggctccatcgta

SEQ ID NO: 8455 - RNA, 20 nt, synthetic construct
  source 1..20: mol_type = other RNA
tcctggagccatctctctcc

SEQ ID NO: 8456 - RNA, 20 nt, synthetic construct
  source 1..20: mol_type = other RNA
tccttgccagaacctctaag

SEQ ID NO: 8457 - RNA, 20 nt, synthetic construct
  source 1..20: mol_type = other RNA
tcgtaagcaaaccttagagg

SEQ ID NO: 8458 - RNA, 20 nt, synthetic construct
  source 1..20: mol_type = other RNA
tctaaggtttgcttacgatg

SEQ ID NO: 8459 - RNA, 20 nt, synthetic construct
  source 1..20: mol_type = other RNA
tctccctcccaggatcctct

SEQ ID NO: 8460 - RNA, 20 nt, synthetic construct
  source 1..20: mol_type = other RNA
tctccttgccagaacctcta

SEQ ID NO: 8461 - RNA, 20 nt, synthetic construct
  source 1..20: mol_type = other RNA
tctctccttgccagaacctc

SEQ ID NO: 8462 - RNA, 20 nt, synthetic construct
  source 1..20: mol_type = other RNA
tctctctccttgccagaacc

SEQ ID NO: 8463 - RNA, 20 nt, synthetic construct
  source 1..20: mol_type = other RNA
tctctggctccatcgtaagc

SEQ ID NO: 8464 - RNA, 20 nt, synthetic construct
  source 1..20: mol_type = other RNA
tctggcaaggagagagatgg

SEQ ID NO: 8465 - RNA, 20 nt, synthetic construct
  source 1..20: mol_type = other RNA
tctggctccatcgtaagcaa

SEQ ID NO: 8466 - RNA, 20 nt, synthetic construct
  source 1..20: mol_type = other RNA
tgacacacccccatttcctg

SEQ ID NO: 8467 - RNA, 20 nt, synthetic construct
  source 1..20: mol_type = other RNA
tgccagaacctctaaggttt

SEQ ID NO: 8468 - RNA, 20 nt, synthetic construct
  source 1..20: mol_type = other RNA
tgcttacgatggagccagag

SEQ ID NO: 8469 - RNA, 20 nt, synthetic construct
  source 1..20: mol_type = other RNA
tggagccagagaggatcctg

SEQ ID NO: 8470 - RNA, 20 nt, synthetic construct
  source 1..20: mol_type = other RNA
tggagccatctctctccttg

SEQ ID NO: 8471 - RNA, 20 nt, synthetic construct
  source 1..20: mol_type = other RNA
tggcaaggagagagatggct

SEQ ID NO: 8472 - RNA, 20 nt, synthetic construct
  source 1..20: mol_type = other RNA
tggctccatcgtaagcaaac

SEQ ID NO: 8473 - RNA, 20 nt, synthetic construct
  source 1..20: mol_type = other RNA
ttacgatggagccagagagg

SEQ ID NO: 8474 - RNA, 20 nt, synthetic construct
  source 1..20: mol_type = other RNA
ttagaggttctggcaaggag

SEQ ID NO: 8475 - RNA, 20 nt, synthetic construct
  source 1..20: mol_type = other RNA
ttcctggagccatctctctc

SEQ ID NO: 8476 - RNA, 20 nt, synthetic construct
  source 1..20: mol_type = other RNA
ttctggcaaggagagagatg

SEQ ID NO: 8477 - RNA, 20 nt, synthetic construct
  source 1..20: mol_type = other RNA
ttgccagaacctctaaggtt

SEQ ID NO: 8478 - RNA, 20 nt, synthetic construct
  source 1..20: mol_type = other RNA
ttgcttacgatggagccaga

SEQ ID NO: 8479 - RNA, 20 nt, synthetic construct
  source 1..20: mol_type = other RNA
tttcctggagccatctctct

SEQ ID NO: 8480 - RNA, 20 nt, synthetic construct
  source 1..20: mol_type = other RNA
tttgcttacgatggagccag

SEQ ID NO: 8481 - RNA, 21 nt, synthetic construct
  source 1..21: mol_type = other RNA
aaaccttagaggttctggcaa

SEQ ID NO: 8482 - RNA, 21 nt, synthetic construct
  source 1..21: mol_type = other RNA
aacctctaaggtttgcttacg

SEQ ID NO: 8483 - RNA, 21 nt, synthetic construct
  source 1..21: mol_type = other RNA
aaccttagaggttctggcaag

SEQ ID NO: 8484 - RNA, 21 nt, synthetic construct
  source 1..21: mol_type = other RNA
aagcaaaccttagaggttctg

SEQ ID NO: 8485 - RNA, 21 nt, synthetic construct
  source 1..21: mol_type = other RNA
aagctctccctcccaggatcc

SEQ ID NO: 8486 - RNA, 21 nt, synthetic construct
  source 1..21: mol_type = other RNA
aaggagagagatggctccagg

SEQ ID NO: 8487 - RNA, 21 nt, synthetic construct
  source 1..21: mol_type = other RNA
aaggtttgcttacgatggagc

SEQ ID NO: 8488 - RNA, 21 nt, synthetic construct
  source 1..21: mol_type = other RNA
acacacccccatttcctggag

SEQ ID NO: 8489 - RNA, 21 nt, synthetic construct
  source 1..21: mol_type = other RNA
acacccccatttcctggagcc

SEQ ID NO: 8490 - RNA, 21 nt, synthetic construct
  source 1..21: mol_type = other RNA
acccccatttcctggagccat

SEQ ID NO: 8491 - RNA, 21 nt, synthetic construct
  source 1..21: mol_type = other RNA
acctctaaggtttgcttacga

SEQ ID NO: 8492 - RNA, 21 nt, synthetic construct
  source 1..21: mol_type = other RNA
accttagaggttctggcaagg

SEQ ID NO: 8493 - RNA, 21 nt, synthetic construct
  source 1..21: mol_type = other RNA
acgatggagccagagaggatc

SEQ ID NO: 8494 - RNA, 21 nt, synthetic construct
  source 1..21: mol_type = other RNA
agaacctctaaggtttgctta

SEQ ID NO: 8495 - RNA, 21 nt, synthetic construct
  source 1..21: mol_type = other RNA
agagagatggctccaggaaat

SEQ ID NO: 8496 - RNA, 21 nt, synthetic construct
  source 1..21: mol_type = other RNA
agagatggctccaggaaatgg

SEQ ID NO: 8497 - RNA, 21 nt, synthetic construct
  source 1..21: mol_type = other RNA
agaggttctggcaaggagaga

SEQ ID NO: 8498 - RNA, 21 nt, synthetic construct
  source 1..21: mol_type = other RNA
agatggctccaggaaatgggg

SEQ ID NO: 8499 - RNA, 21 nt, synthetic construct
  source 1..21: mol_type = other RNA
agcaaaccttagaggttctgg

SEQ ID NO: 8500 - RNA, 21 nt, synthetic construct
  source 1..21: mol_type = other RNA
agccagagaggatcctgggag

SEQ ID NO: 8501 - RNA, 21 nt, synthetic construct
  source 1..21: mol_type = other RNA
agccatctctctccttgccag

SEQ ID NO: 8502 - RNA, 21 nt, synthetic construct
  source 1..21: mol_type = other RNA
agctctccctcccaggatcct

SEQ ID NO: 8503 - RNA, 21 nt, synthetic construct
  source 1..21: mol_type = other RNA
aggagagagatggctccagga

SEQ ID NO: 8504 - RNA, 21 nt, synthetic construct
  source 1..21: mol_type = other RNA
aggatcctctctggctccatc

SEQ ID NO: 8505 - RNA, 21 nt, synthetic construct
  source 1..21: mol_type = other RNA
aggttctggcaaggagagaga

SEQ ID NO: 8506 - RNA, 21 nt, synthetic construct
  source 1..21: mol_type = other RNA
aggtttgcttacgatggagcc

SEQ ID NO: 8507 - RNA, 21 nt, synthetic construct
  source 1..21: mol_type = other RNA
atcctctctggctccatcgta

SEQ ID NO: 8508 - RNA, 21 nt, synthetic construct
  source 1..21: mol_type = other RNA
atcgtaagcaaaccttagagg

SEQ ID NO: 8509 - RNA, 21 nt, synthetic construct
  source 1..21: mol_type = other RNA
atctctctccttgccagaacc

SEQ ID NO: 8510 - RNA, 21 nt, synthetic construct
  source 1..21: mol_type = other RNA
atggagccagagaggatcctg

SEQ ID NO: 8511 - RNA, 21 nt, synthetic construct
  source 1..21: mol_type = other RNA
atttcctggagccatctctct

SEQ ID NO: 8512 - RNA, 21 nt, synthetic construct
  source 1..21: mol_type = other RNA
caaaccttagaggttctggca

SEQ ID NO: 8513 - RNA, 21 nt, synthetic construct
  source 1..21: mol_type = other RNA
caagctctccctcccaggatc

SEQ ID NO: 8514 - RNA, 21 nt, synthetic construct
  source 1..21: mol_type = other RNA
caaggagagagatggctccag

SEQ ID NO: 8515 - RNA, 21 nt, synthetic construct
  source 1..21: mol_type = other RNA
cacacccccatttcctggagc

SEQ ID NO: 8516 - RNA, 21 nt, synthetic construct
  source 1..21: mol_type = other RNA
cacccccatttcctggagcca

SEQ ID NO: 8517 - RNA, 21 nt, synthetic construct
  source 1..21: mol_type = other RNA
cagaacctctaaggtttgctt

SEQ ID NO: 8518 - RNA, 21 nt, synthetic construct
  source 1..21: mol_type = other RNA
cagagaggatcctgggaggga

SEQ ID NO: 8519 - RNA, 21 nt, synthetic construct
  source 1..21: mol_type = other RNA
caggatcctctctggctccat

SEQ ID NO: 8520 - RNA, 21 nt, synthetic construct
  source 1..21: mol_type = other RNA
catcgtaagcaaaccttagag

SEQ ID NO: 8521 - RNA, 21 nt, synthetic construct
  source 1..21: mol_type = other RNA
catctctctccttgccagaac

SEQ ID NO: 8522 - RNA, 21 nt, synthetic construct
  source 1..21: mol_type = other RNA
catttcctggagccatctctc

SEQ ID NO: 8523 - RNA, 21 nt, synthetic construct
  source 1..21: mol_type = other RNA
ccaagctctccctcccaggat

SEQ ID NO: 8524 - RNA, 21 nt, synthetic construct
  source 1..21: mol_type = other RNA
ccagaacctctaaggtttgct

SEQ ID NO: 8525 - RNA, 21 nt, synthetic construct
  source 1..21: mol_type = other RNA
ccagagaggatcctgggaggg

SEQ ID NO: 8526 - RNA, 21 nt, synthetic construct
  source 1..21: mol_type = other RNA
ccaggatcctctctggctcca

SEQ ID NO: 8527 - RNA, 21 nt, synthetic construct
  source 1..21: mol_type = other RNA
ccatcgtaagcaaaccttaga

SEQ ID NO: 8528 - RNA, 21 nt, synthetic construct
  source 1..21: mol_type = other RNA
ccatctctctccttgccagaa

SEQ ID NO: 8529 - RNA, 21 nt, synthetic construct
  source 1..21: mol_type = other RNA
ccatttcctggagccatctct

SEQ ID NO: 8530 - RNA, 21 nt, synthetic construct
  source 1..21: mol_type = other RNA
cccaggatcctctctggctcc

SEQ ID NO: 8531 - RNA, 21 nt, synthetic construct
  source 1..21: mol_type = other RNA
cccatttcctggagccatctc

SEQ ID NO: 8532 - RNA, 21 nt, synthetic construct
  source 1..21: mol_type = other RNA
ccccatttcctggagccatct

SEQ ID NO: 8533 - RNA, 21 nt, synthetic construct
  source 1..21: mol_type = other RNA
cccccatttcctggagccatc

SEQ ID NO: 8534 - RNA, 21 nt, synthetic construct
  source 1..21: mol_type = other RNA
ccctcccaggatcctctctgg

SEQ ID NO: 8535 - RNA, 21 nt, synthetic construct
  source 1..21: mol_type = other RNA
cctcccaggatcctctctggc

SEQ ID NO: 8536 - RNA, 21 nt, synthetic construct
  source 1..21: mol_type = other RNA
cctctaaggtttgcttacgat

SEQ ID NO: 8537 - RNA, 21 nt, synthetic construct
  source 1..21: mol_type = other RNA
cctctctggctccatcgtaag

SEQ ID NO: 8538 - RNA, 21 nt, synthetic construct
  source 1..21: mol_type = other RNA
cctggagccatctctctcctt

SEQ ID NO: 8539 - RNA, 21 nt, synthetic construct
  source 1..21: mol_type = other RNA
ccttagaggttctggcaagga

SEQ ID NO: 8540 - RNA, 21 nt, synthetic construct
  source 1..21: mol_type = other RNA
ccttgccagaacctctaaggt

SEQ ID NO: 8541 - RNA, 21 nt, synthetic construct
  source 1..21: mol_type = other RNA
cgatggagccagagaggatcc

SEQ ID NO: 8542 - RNA, 21 nt, synthetic construct
  source 1..21: mol_type = other RNA
cgtaagcaaaccttagaggtt

SEQ ID NO: 8543 - RNA, 21 nt, synthetic construct
  source 1..21: mol_type = other RNA
ctaaggtttgcttacgatgga

SEQ ID NO: 8544 - RNA, 21 nt, synthetic construct
  source 1..21: mol_type = other RNA
ctccatcgtaagcaaacctta

SEQ ID NO: 8545 - RNA, 21 nt, synthetic construct
  source 1..21: mol_type = other RNA
ctcccaggatcctctctggct

SEQ ID NO: 8546 - RNA, 21 nt, synthetic construct
  source 1..21: mol_type = other RNA
ctccctcccaggatcctctct

SEQ ID NO: 8547 - RNA, 21 nt, synthetic construct
  source 1..21: mol_type = other RNA
ctccttgccagaacctctaag

SEQ ID NO: 8548 - RNA, 21 nt, synthetic construct
  source 1..21: mol_type = other RNA
ctctaaggtttgcttacgatg

SEQ ID NO: 8549 - RNA, 21 nt, synthetic construct
  source 1..21: mol_type = other RNA
ctctccctcccaggatcctct

SEQ ID NO: 8550 - RNA, 21 nt, synthetic construct
  source 1..21: mol_type = other RNA
ctctccttgccagaacctcta

SEQ ID NO: 8551 - RNA, 21 nt, synthetic construct
  source 1..21: mol_type = other RNA
ctctctccttgccagaacctc

SEQ ID NO: 8552 - RNA, 21 nt, synthetic construct
  source 1..21: mol_type = other RNA
ctctctggctccatcgtaagc

SEQ ID NO: 8553 - RNA, 21 nt, synthetic construct
  source 1..21: mol_type = other RNA
ctctggctccatcgtaagcaa

SEQ ID NO: 8554 - RNA, 21 nt, synthetic construct
  source 1..21: mol_type = other RNA
ctggagccatctctctccttg

SEQ ID NO: 8555 - RNA, 21 nt, synthetic construct
  source 1..21: mol_type = other RNA
ctggcaaggagagagatggct

SEQ ID NO: 8556 - RNA, 21 nt, synthetic construct
  source 1..21: mol_type = other RNA
ctggctccatcgtaagcaaac

SEQ ID NO: 8557 - RNA, 21 nt, synthetic construct
  source 1..21: mol_type = other RNA
cttacgatggagccagagagg

SEQ ID NO: 8558 - RNA, 21 nt, synthetic construct
  source 1..21: mol_type = other RNA
cttagaggttctggcaaggag

SEQ ID NO: 8559 - RNA, 21 nt, synthetic construct
  source 1..21: mol_type = other RNA
cttgccagaacctctaaggtt

SEQ ID NO: 8560 - RNA, 21 nt, synthetic construct
  source 1..21: mol_type = other RNA
gaacctctaaggtttgcttac

SEQ ID NO: 8561 - RNA, 21 nt, synthetic construct
  source 1..21: mol_type = other RNA
gacacacccccatttcctgga

SEQ ID NO: 8562 - RNA, 21 nt, synthetic construct
  source 1..21: mol_type = other RNA
gagagagatggctccaggaaa

SEQ ID NO: 8563 - RNA, 21 nt, synthetic construct
  source 1..21: mol_type = other RNA
gagagatggctccaggaaatg

SEQ ID NO: 8564 - RNA, 21 nt, synthetic construct
  source 1..21: mol_type = other RNA
gagatggctccaggaaatggg

SEQ ID NO: 8565 - RNA, 21 nt, synthetic construct
  source 1..21: mol_type = other RNA
gagccagagaggatcctggga

SEQ ID NO: 8566 - RNA, 21 nt, synthetic construct
  source 1..21: mol_type = other RNA
gagccatctctctccttgcca

SEQ ID NO: 8567 - RNA, 21 nt, synthetic construct
  source 1..21: mol_type = other RNA
gaggttctggcaaggagagag

SEQ ID NO: 8568 - RNA, 21 nt, synthetic construct
  source 1..21: mol_type = other RNA
gatcctctctggctccatcgt

SEQ ID NO: 8569 - RNA, 21 nt, synthetic construct
  source 1..21: mol_type = other RNA
gatggagccagagaggatcct

SEQ ID NO: 8570 - RNA, 21 nt, synthetic construct
  source 1..21: mol_type = other RNA
gatggctccaggaaatggggg

SEQ ID NO: 8571 - RNA, 21 nt, synthetic construct
  source 1..21: mol_type = other RNA
gcaaaccttagaggttctggc

SEQ ID NO: 8572 - RNA, 21 nt, synthetic construct
  source 1..21: mol_type = other RNA
gcaaggagagagatggctcca

SEQ ID NO: 8573 - RNA, 21 nt, synthetic construct
  source 1..21: mol_type = other RNA
gccagaacctctaaggtttgc

SEQ ID NO: 8574 - RNA, 21 nt, synthetic construct
  source 1..21: mol_type = other RNA
gccagagaggatcctgggagg

SEQ ID NO: 8575 - RNA, 21 nt, synthetic construct
  source 1..21: mol_type = other RNA
gccatctctctccttgccaga

SEQ ID NO: 8576 - RNA, 21 nt, synthetic construct
  source 1..21: mol_type = other RNA
gctccatcgtaagcaaacctt

SEQ ID NO: 8577 - RNA, 21 nt, synthetic construct
  source 1..21: mol_type = other RNA
gctctccctcccaggatcctc

SEQ ID NO: 8578 - RNA, 21 nt, synthetic construct
  source 1..21: mol_type = other RNA
gcttacgatggagccagagag

SEQ ID NO: 8579 - RNA, 21 nt, synthetic construct
  source 1..21: mol_type = other RNA
ggagagagatggctccaggaa

SEQ ID NO: 8580 - RNA, 21 nt, synthetic construct
  source 1..21: mol_type = other RNA
ggagccagagaggatcctggg

SEQ ID NO: 8581 - RNA, 21 nt, synthetic construct
  source 1..21: mol_type = other RNA
ggagccatctctctccttgcc

SEQ ID NO: 8582 - RNA, 21 nt, synthetic construct
  source 1..21: mol_type = other RNA
ggatcctctctggctccatcg

SEQ ID NO: 8583 - RNA, 21 nt, synthetic construct
  source 1..21: mol_type = other RNA
ggcaaggagagagatggctcc

SEQ ID NO: 8584 - RNA, 21 nt, synthetic construct
  source 1..21: mol_type = other RNA
ggctccatcgtaagcaaacct

SEQ ID NO: 8585 - RNA, 21 nt, synthetic construct
  source 1..21: mol_type = other RNA
ggttctggcaaggagagagat

SEQ ID NO: 8586 - RNA, 21 nt, synthetic construct
  source 1..21: mol_type = other RNA
ggtttgcttacgatggagcca

SEQ ID NO: 8587 - RNA, 21 nt, synthetic construct
  source 1..21: mol_type = other RNA
gtaagcaaaccttagaggttc

SEQ ID NO: 8588 - RNA, 21 nt, synthetic construct
  source 1..21: mol_type = other RNA
gtgacacacccccatttcctg

SEQ ID NO: 8589 - RNA, 21 nt, synthetic construct
  source 1..21: mol_type = other RNA
gttctggcaaggagagagatg

SEQ ID NO: 8590 - RNA, 21 nt, synthetic construct
  source 1..21: mol_type = other RNA
gtttgcttacgatggagccag

SEQ ID NO: 8591 - RNA, 21 nt, synthetic construct
  source 1..21: mol_type = other RNA
taagcaaaccttagaggttct

SEQ ID NO: 8592 - RNA, 21 nt, synthetic construct
  source 1..21: mol_type = other RNA
taaggtttgcttacgatggag

SEQ ID NO: 8593 - RNA, 21 nt, synthetic construct
  source 1..21: mol_type = other RNA
tacgatggagccagagaggat

SEQ ID NO: 8594 - RNA, 21 nt, synthetic construct
  source 1..21: mol_type = other RNA
tagaggttctggcaaggagag

SEQ ID NO: 8595 - RNA, 21 nt, synthetic construct
  source 1..21: mol_type = other RNA
tccatcgtaagcaaaccttag

SEQ ID NO: 8596 - RNA, 21 nt, synthetic construct
  source 1..21: mol_type = other RNA
tcccaggatcctctctggctc

SEQ ID NO: 8597 - RNA, 21 nt, synthetic construct
  source 1..21: mol_type = other RNA
tccctcccaggatcctctctg

SEQ ID NO: 8598 - RNA, 21 nt, synthetic construct
  source 1..21: mol_type = other RNA
tcctctctggctccatcgtaa

SEQ ID NO: 8599 - RNA, 21 nt, synthetic construct
  source 1..21: mol_type = other RNA
tcctggagccatctctctcct

SEQ ID NO: 8600 - RNA, 21 nt, synthetic construct
  source 1..21: mol_type = other RNA
tccttgccagaacctctaagg

SEQ ID NO: 8601 - RNA, 21 nt, synthetic construct
  source 1..21: mol_type = other RNA
tcgtaagcaaaccttagaggt

SEQ ID NO: 8602 - RNA, 21 nt, synthetic construct
  source 1..21: mol_type = other RNA
tctaaggtttgcttacgatgg

SEQ ID NO: 8603 - RNA, 21 nt, synthetic construct
  source 1..21: mol_type = other RNA
tctccctcccaggatcctctc

SEQ ID NO: 8604 - RNA, 21 nt, synthetic construct
  source 1..21: mol_type = other RNA
tctccttgccagaacctctaa

SEQ ID NO: 8605 - RNA, 21 nt, synthetic construct
  source 1..21: mol_type = other RNA
tctctccttgccagaacctct

SEQ ID NO: 8606 - RNA, 21 nt, synthetic construct
  source 1..21: mol_type = other RNA
tctctctccttgccagaacct

SEQ ID NO: 8607 - RNA, 21 nt, synthetic construct
  source 1..21: mol_type = other RNA
tctctggctccatcgtaagca

SEQ ID NO: 8608 - RNA, 21 nt, synthetic construct
  source 1..21: mol_type = other RNA
tctggcaaggagagagatggc

SEQ ID NO: 8609 - RNA, 21 nt, synthetic construct
  source 1..21: mol_type = other RNA
tctggctccatcgtaagcaaa

SEQ ID NO: 8610 - RNA, 21 nt, synthetic construct
  source 1..21: mol_type = other RNA
tgacacacccccatttcctgg

SEQ ID NO: 8611 - RNA, 21 nt, synthetic construct
  source 1..21: mol_type = other RNA
tgccagaacctctaaggtttg

SEQ ID NO: 8612 - RNA, 21 nt, synthetic construct
  source 1..21: mol_type = other RNA
tgcttacgatggagccagaga

SEQ ID NO: 8613 - RNA, 21 nt, synthetic construct
  source 1..21: mol_type = other RNA
tggagccagagaggatcctgg

SEQ ID NO: 8614 - RNA, 21 nt, synthetic construct
  source 1..21: mol_type = other RNA
tggagccatctctctccttgc

SEQ ID NO: 8615 - RNA, 21 nt, synthetic construct
  source 1..21: mol_type = other RNA
tggcaaggagagagatggctc

SEQ ID NO: 8616 - RNA, 21 nt, synthetic construct
  source 1..21: mol_type = other RNA
tggctccatcgtaagcaaacc

SEQ ID NO: 8617 - RNA, 21 nt, synthetic construct
  source 1..21: mol_type = other RNA
ttacgatggagccagagagga

SEQ ID NO: 8618 - RNA, 21 nt, synthetic construct
  source 1..21: mol_type = other RNA
ttagaggttctggcaaggaga

SEQ ID NO: 8619 - RNA, 21 nt, synthetic construct
  source 1..21: mol_type = other RNA
ttcctggagccatctctctcc

SEQ ID NO: 8620 - RNA, 21 nt, synthetic construct
  source 1..21: mol_type = other RNA
ttctggcaaggagagagatgg

SEQ ID NO: 8621 - RNA, 21 nt, synthetic construct
  source 1..21: mol_type = other RNA
ttgccagaacctctaaggttt

SEQ ID NO: 8622 - RNA, 21 nt, synthetic construct
  source 1..21: mol_type = other RNA
ttgcttacgatggagccagag

SEQ ID NO: 8623 - RNA, 21 nt, synthetic construct
  source 1..21: mol_type = other RNA
tttcctggagccatctctctc

SEQ ID NO: 8624 - RNA, 21 nt, synthetic construct
  source 1..21: mol_type = other RNA
tttgcttacgatggagccaga

SEQ ID NO: 8625 - RNA, 22 nt, synthetic construct
  source 1..22: mol_type = other RNA
aaaccttagaggttctggcaag

SEQ ID NO: 8626 - RNA, 22 nt, synthetic construct
  source 1..22: mol_type = other RNA
aacctctaaggtttgcttacga

SEQ ID NO: 8627 - RNA, 22 nt, synthetic construct
  source 1..22: mol_type = other RNA
aaccttagaggttctggcaagg

SEQ ID NO: 8628 - RNA, 22 nt, synthetic construct
  source 1..22: mol_type = other RNA
aagcaaaccttagaggttctgg

SEQ ID NO: 8629 - RNA, 22 nt, synthetic construct
  source 1..22: mol_type = other RNA
aagctctccctcccaggatcct

SEQ ID NO: 8630 - RNA, 22 nt, synthetic construct
  source 1..22: mol_type = other RNA
aaggagagagatggctccagga

SEQ ID NO: 8631 - RNA, 22 nt, synthetic construct
  source 1..22: mol_type = other RNA
aaggtttgcttacgatggagcc

SEQ ID NO: 8632 - RNA, 22 nt, synthetic construct
  source 1..22: mol_type = other RNA
acacacccccatttcctggagc

SEQ ID NO: 8633 - RNA, 22 nt, synthetic construct
  source 1..22: mol_type = other RNA
acacccccatttcctggagcca

SEQ ID NO: 8634 - RNA, 22 nt, synthetic construct
  source 1..22: mol_type = other RNA
acccccatttcctggagccatc

SEQ ID NO: 8635 - RNA, 22 nt, synthetic construct
  source 1..22: mol_type = other RNA
acctctaaggtttgcttacgat

SEQ ID NO: 8636 - RNA, 22 nt, synthetic construct
  source 1..22: mol_type = other RNA
accttagaggttctggcaagga

SEQ ID NO: 8637 - RNA, 22 nt, synthetic construct
  source 1..22: mol_type = other RNA
acgatggagccagagaggatcc

SEQ ID NO: 8638 - RNA, 22 nt, synthetic construct
  source 1..22: mol_type = other RNA
agaacctctaaggtttgcttac

SEQ ID NO: 8639 - RNA, 22 nt, synthetic construct
  source 1..22: mol_type = other RNA
agagagatggctccaggaaatg

SEQ ID NO: 8640 - RNA, 22 nt, synthetic construct
  source 1..22: mol_type = other RNA
agagatggctccaggaaatggg

SEQ ID NO: 8641 - RNA, 22 nt, synthetic construct
  source 1..22: mol_type = other RNA
agaggttctggcaaggagagag

SEQ ID NO: 8642 - RNA, 22 nt, synthetic construct
  source 1..22: mol_type = other RNA
agatggctccaggaaatggggg

SEQ ID NO: 8643 - RNA, 22 nt, synthetic construct
  source 1..22: mol_type = other RNA
agcaaaccttagaggttctggc

SEQ ID NO: 8644 - RNA, 22 nt, synthetic construct
  source 1..22: mol_type = other RNA
agccagagaggatcctgggagg

SEQ ID NO: 8645 - RNA, 22 nt, synthetic construct
  source 1..22: mol_type = other RNA
agccatctctctccttgccaga

SEQ ID NO: 8646 - RNA, 22 nt, synthetic construct
  source 1..22: mol_type = other RNA
agctctccctcccaggatcctc

SEQ ID NO: 8647 - RNA, 22 nt, synthetic construct
  source 1..22: mol_type = other RNA
aggagagagatggctccaggaa

SEQ ID NO: 8648 - RNA, 22 nt, synthetic construct
  source 1..22: mol_type = other RNA
aggatcctctctggctccatcg

SEQ ID NO: 8649 - RNA, 22 nt, synthetic construct
  source 1..22: mol_type = other RNA
aggttctggcaaggagagagat

SEQ ID NO: 8650 - RNA, 22 nt, synthetic construct
  source 1..22: mol_type = other RNA
aggtttgcttacgatggagcca

SEQ ID NO: 8651 - RNA, 22 nt, synthetic construct
  source 1..22: mol_type = other RNA
atcctctctggctccatcgtaa

SEQ ID NO: 8652 - RNA, 22 nt, synthetic construct
  source 1..22: mol_type = other RNA
atcgtaagcaaaccttagaggt

SEQ ID NO: 8653 - RNA, 22 nt, synthetic construct
  source 1..22: mol_type = other RNA
atctctctccttgccagaacct

SEQ ID NO: 8654 - RNA, 22 nt, synthetic construct
  source 1..22: mol_type = other RNA
atggagccagagaggatcctgg

SEQ ID NO: 8655 - RNA, 22 nt, synthetic construct
  source 1..22: mol_type = other RNA
atttcctggagccatctctctc

SEQ ID NO: 8656 - RNA, 22 nt, synthetic construct
  source 1..22: mol_type = other RNA
caaaccttagaggttctggcaa

SEQ ID NO: 8657 - RNA, 22 nt, synthetic construct
  source 1..22: mol_type = other RNA
caagctctccctcccaggatcc

SEQ ID NO: 8658 - RNA, 22 nt, synthetic construct
  source 1..22: mol_type = other RNA
caaggagagagatggctccagg

SEQ ID NO: 8659 - RNA, 22 nt, synthetic construct
  source 1..22: mol_type = other RNA
cacacccccatttcctggagcc

SEQ ID NO: 8660 - RNA, 22 nt, synthetic construct
  source 1..22: mol_type = other RNA
cacccccatttcctggagccat

SEQ ID NO: 8661 - RNA, 22 nt, synthetic construct
  source 1..22: mol_type = other RNA
cagaacctctaaggtttgctta

SEQ ID NO: 8662 - RNA, 22 nt, synthetic construct
  source 1..22: mol_type = other RNA
caggatcctctctggctccatc

SEQ ID NO: 8663 - RNA, 22 nt, synthetic construct
  source 1..22: mol_type = other RNA
catcgtaagcaaaccttagagg

SEQ ID NO: 8664 - RNA, 22 nt, synthetic construct
  source 1..22: mol_type = other RNA
catctctctccttgccagaacc

SEQ ID NO: 8665 - RNA, 22 nt, synthetic construct
  source 1..22: mol_type = other RNA
catttcctggagccatctctct

SEQ ID NO: 8666 - RNA, 22 nt, synthetic construct
  source 1..22: mol_type = other RNA
ccaagctctccctcccaggatc

SEQ ID NO: 8667 - RNA, 22 nt, synthetic construct
  source 1..22: mol_type = other RNA
ccagaacctctaaggtttgctt

SEQ ID NO: 8668 - RNA, 22 nt, synthetic construct
  source 1..22: mol_type = other RNA
ccagagaggatcctgggaggga

SEQ ID NO: 8669 - RNA, 22 nt, synthetic construct
  source 1..22: mol_type = other RNA
ccaggatcctctctggctccat

SEQ ID NO: 8670 - RNA, 22 nt, synthetic construct
  source 1..22: mol_type = other RNA
ccatcgtaagcaaaccttagag

SEQ ID NO: 8671 - RNA, 22 nt, synthetic construct
  source 1..22: mol_type = other RNA
ccatctctctccttgccagaac

SEQ ID NO: 8672 - RNA, 22 nt, synthetic construct
  source 1..22: mol_type = other RNA
ccatttcctggagccatctctc

SEQ ID NO: 8673 - RNA, 22 nt, synthetic construct
  source 1..22: mol_type = other RNA
cccaggatcctctctggctcca

SEQ ID NO: 8674 - RNA, 22 nt, synthetic construct
  source 1..22: mol_type = other RNA
cccatttcctggagccatctct

SEQ ID NO: 8675 - RNA, 22 nt, synthetic construct
  source 1..22: mol_type = other RNA
ccccatttcctggagccatctc

SEQ ID NO: 8676 - RNA, 22 nt, synthetic construct
  source 1..22: mol_type = other RNA
cccccatttcctggagccatct

SEQ ID NO: 8677 - RNA, 22 nt, synthetic construct
  source 1..22: mol_type = other RNA
ccctcccaggatcctctctggc

SEQ ID NO: 8678 - RNA, 22 nt, synthetic construct
  source 1..22: mol_type = other RNA
cctcccaggatcctctctggct

SEQ ID NO: 8679 - RNA, 22 nt, synthetic construct
  source 1..22: mol_type = other RNA
cctctaaggtttgcttacgatg

SEQ ID NO: 8680 - RNA, 22 nt, synthetic construct
  source 1..22: mol_type = other RNA
cctctctggctccatcgtaagc

SEQ ID NO: 8681 - RNA, 22 nt, synthetic construct
  source 1..22: mol_type = other RNA
cctggagccatctctctccttg

SEQ ID NO: 8682 - RNA, 22 nt, synthetic construct
  source 1..22: mol_type = other RNA
ccttagaggttctggcaaggag

SEQ ID NO: 8683 - RNA, 22 nt, synthetic construct
  source 1..22: mol_type = other RNA
ccttgccagaacctctaaggtt

SEQ ID NO: 8684 - RNA, 22 nt, synthetic construct
  source 1..22: mol_type = other RNA
cgatggagccagagaggatcct

SEQ ID NO: 8685 - RNA, 22 nt, synthetic construct
  source 1..22: mol_type = other RNA
cgtaagcaaaccttagaggttc

SEQ ID NO: 8686 - RNA, 22 nt, synthetic construct
  source 1..22: mol_type = other RNA
ctaaggtttgcttacgatggag

SEQ ID NO: 8687 - RNA, 22 nt, synthetic construct
  source 1..22: mol_type = other RNA
ctccatcgtaagcaaaccttag

SEQ ID NO: 8688 - RNA, 22 nt, synthetic construct
  source 1..22: mol_type = other RNA
ctcccaggatcctctctggctc

SEQ ID NO: 8689 - RNA, 22 nt, synthetic construct
  source 1..22: mol_type = other RNA
ctccctcccaggatcctctctg

SEQ ID NO: 8690 - RNA, 22 nt, synthetic construct
  source 1..22: mol_type = other RNA
ctccttgccagaacctctaagg

SEQ ID NO: 8691 - RNA, 22 nt, synthetic construct
  source 1..22: mol_type = other RNA
ctctaaggtttgcttacgatgg

SEQ ID NO: 8692 - RNA, 22 nt, synthetic construct
  source 1..22: mol_type = other RNA
ctctccctcccaggatcctctc

SEQ ID NO: 8693 - RNA, 22 nt, synthetic construct
  source 1..22: mol_type = other RNA
ctctccttgccagaacctctaa

SEQ ID NO: 8694 - RNA, 22 nt, synthetic construct
  source 1..22: mol_type = other RNA
ctctctccttgccagaacctct

SEQ ID NO: 8695 - RNA, 22 nt, synthetic construct
  source 1..22: mol_type = other RNA
ctctctggctccatcgtaagca

SEQ ID NO: 8696 - RNA, 22 nt, synthetic construct
  source 1..22: mol_type = other RNA
ctctggctccatcgtaagcaaa

SEQ ID NO: 8697 - RNA, 22 nt, synthetic construct
  source 1..22: mol_type = other RNA
ctggagccatctctctccttgc

SEQ ID NO: 8698 - RNA, 22 nt, synthetic construct
  source 1..22: mol_type = other RNA
ctggcaaggagagagatggctc

SEQ ID NO: 8699 - RNA, 22 nt, synthetic construct
  source 1..22: mol_type = other RNA
ctggctccatcgtaagcaaacc

SEQ ID NO: 8700 - RNA, 22 nt, synthetic construct
  source 1..22: mol_type = other RNA
cttacgatggagccagagagga

SEQ ID NO: 8701 - RNA, 22 nt, synthetic construct
  source 1..22: mol_type = other RNA
cttagaggttctggcaaggaga

SEQ ID NO: 8702 - RNA, 22 nt, synthetic construct
  source 1..22: mol_type = other RNA
cttgccagaacctctaaggttt

SEQ ID NO: 8703 - RNA, 22 nt, synthetic construct
  source 1..22: mol_type = other RNA
gaacctctaaggtttgcttacg

SEQ ID NO: 8704 - RNA, 22 nt, synthetic construct
  source 1..22: mol_type = other RNA
gacacacccccatttcctggag

SEQ ID NO: 8705 - RNA, 22 nt, synthetic construct
  source 1..22: mol_type = other RNA
gagagagatggctccaggaaat

SEQ ID NO: 8706 - RNA, 22 nt, synthetic construct
  source 1..22: mol_type = other RNA
gagagatggctccaggaaatgg

SEQ ID NO: 8707 - RNA, 22 nt, synthetic construct
  source 1..22: mol_type = other RNA
gagatggctccaggaaatgggg

SEQ ID NO: 8708 - RNA, 22 nt, synthetic construct
  source 1..22: mol_type = other RNA
gagccagagaggatcctgggag

SEQ ID NO: 8709 - RNA, 22 nt, synthetic construct
  source 1..22: mol_type = other RNA
gagccatctctctccttgccag

SEQ ID NO: 8710 - RNA, 22 nt, synthetic construct
  source 1..22: mol_type = other RNA
gaggttctggcaaggagagaga

SEQ ID NO: 8711 - RNA, 22 nt, synthetic construct
  source 1..22: mol_type = other RNA
gatcctctctggctccatcgta

SEQ ID NO: 8712 - RNA, 22 nt, synthetic construct
  source 1..22: mol_type = other RNA
gatggagccagagaggatcctg

SEQ ID NO: 8713 - RNA, 22 nt, synthetic construct
  source 1..22: mol_type = other RNA
gcaaaccttagaggttctggca

SEQ ID NO: 8714 - RNA, 22 nt, synthetic construct
  source 1..22: mol_type = other RNA
gcaaggagagagatggctccag

SEQ ID NO: 8715 - RNA, 22 nt, synthetic construct
  source 1..22: mol_type = other RNA
gccagaacctctaaggtttgct

SEQ ID NO: 8716 - RNA, 22 nt, synthetic construct
  source 1..22: mol_type = other RNA
gccagagaggatcctgggaggg

SEQ ID NO: 8717 - RNA, 22 nt, synthetic construct
  source 1..22: mol_type = other RNA
gccatctctctccttgccagaa

SEQ ID NO: 8718 - RNA, 22 nt, synthetic construct
  source 1..22: mol_type = other RNA
gctccatcgtaagcaaacctta

SEQ ID NO: 8719 - RNA, 22 nt, synthetic construct
  source 1..22: mol_type = other RNA
gctctccctcccaggatcctct

SEQ ID NO: 8720 - RNA, 22 nt, synthetic construct
  source 1..22: mol_type = other RNA
gcttacgatggagccagagagg

SEQ ID NO: 8721 - RNA, 22 nt, synthetic construct
  source 1..22: mol_type = other RNA
ggagagagatggctccaggaaa

SEQ ID NO: 8722 - RNA, 22 nt, synthetic construct
  source 1..22: mol_type = other RNA
ggagccagagaggatcctggga

SEQ ID NO: 8723 - RNA, 22 nt, synthetic construct
  source 1..22: mol_type = other RNA
ggagccatctctctccttgcca

SEQ ID NO: 8724 - RNA, 22 nt, synthetic construct
  source 1..22: mol_type = other RNA
ggatcctctctggctccatcgt

SEQ ID NO: 8725 - RNA, 22 nt, synthetic construct
  source 1..22: mol_type = other RNA
ggcaaggagagagatggctcca

SEQ ID NO: 8726 - RNA, 22 nt, synthetic construct
  source 1..22: mol_type = other RNA
ggctccatcgtaagcaaacctt

SEQ ID NO: 8727 - RNA, 22 nt, synthetic construct
  source 1..22: mol_type = other RNA
ggttctggcaaggagagagatg

SEQ ID NO: 8728 - RNA, 22 nt, synthetic construct
  source 1..22: mol_type = other RNA
ggtttgcttacgatggagccag

SEQ ID NO: 8729 - RNA, 22 nt, synthetic construct
  source 1..22: mol_type = other RNA
gtaagcaaaccttagaggttct

SEQ ID NO: 8730 - RNA, 22 nt, synthetic construct
  source 1..22: mol_type = other RNA
gtgacacacccccatttcctgg

SEQ ID NO: 8731 - RNA, 22 nt, synthetic construct
  source 1..22: mol_type = other RNA
gttctggcaaggagagagatgg

SEQ ID NO: 8732 - RNA, 22 nt, synthetic construct
  source 1..22: mol_type = other RNA
gtttgcttacgatggagccaga

SEQ ID NO: 8733 - RNA, 22 nt, synthetic construct
  source 1..22: mol_type = other RNA
taagcaaaccttagaggttctg

SEQ ID NO: 8734 - RNA, 22 nt, synthetic construct
  source 1..22: mol_type = other RNA
taaggtttgcttacgatggagc

SEQ ID NO: 8735 - RNA, 22 nt, synthetic construct
  source 1..22: mol_type = other RNA
tacgatggagccagagaggatc

SEQ ID NO: 8736 - RNA, 22 nt, synthetic construct
  source 1..22: mol_type = other RNA
tagaggttctggcaaggagaga

SEQ ID NO: 8737 - RNA, 22 nt, synthetic construct
  source 1..22: mol_type = other RNA
tccatcgtaagcaaaccttaga

SEQ ID NO: 8738 - RNA, 22 nt, synthetic construct
  source 1..22: mol_type = other RNA
tcccaggatcctctctggctcc

SEQ ID NO: 8739 - RNA, 22 nt, synthetic construct
  source 1..22: mol_type = other RNA
tccctcccaggatcctctctgg

SEQ ID NO: 8740 - RNA, 22 nt, synthetic construct
  source 1..22: mol_type = other RNA
tcctctctggctccatcgtaag

SEQ ID NO: 8741 - RNA, 22 nt, synthetic construct
  source 1..22: mol_type = other RNA
tcctggagccatctctctcctt

SEQ ID NO: 8742 - RNA, 22 nt, synthetic construct
  source 1..22: mol_type = other RNA
tccttgccagaacctctaaggt

SEQ ID NO: 8743 - RNA, 22 nt, synthetic construct
  source 1..22: mol_type = other RNA
tcgtaagcaaaccttagaggtt

SEQ ID NO: 8744 - RNA, 22 nt, synthetic construct
  source 1..22: mol_type = other RNA
tctaaggtttgcttacgatgga

SEQ ID NO: 8745 - RNA, 22 nt, synthetic construct
  source 1..22: mol_type = other RNA
tctccctcccaggatcctctct

SEQ ID NO: 8746 - RNA, 22 nt, synthetic construct
  source 1..22: mol_type = other RNA
tctccttgccagaacctctaag

SEQ ID NO: 8747 - RNA, 22 nt, synthetic construct
  source 1..22: mol_type = other RNA
tctctccttgccagaacctcta

SEQ ID NO: 8748 - RNA, 22 nt, synthetic construct
  source 1..22: mol_type = other RNA
tctctctccttgccagaacctc

SEQ ID NO: 8749 - RNA, 22 nt, synthetic construct
  source 1..22: mol_type = other RNA
tctctggctccatcgtaagcaa

SEQ ID NO: 8750 - RNA, 22 nt, synthetic construct
  source 1..22: mol_type = other RNA
tctggcaaggagagagatggct

SEQ ID NO: 8751 - RNA, 22 nt, synthetic construct
  source 1..22: mol_type = other RNA
tctggctccatcgtaagcaaac

SEQ ID NO: 8752 - RNA, 22 nt, synthetic construct
  source 1..22: mol_type = other RNA
tgacacacccccatttcctgga

SEQ ID NO: 8753 - RNA, 22 nt, synthetic construct
  source 1..22: mol_type = other RNA
tgccagaacctctaaggtttgc

SEQ ID NO: 8754 - RNA, 22 nt, synthetic construct
  source 1..22: mol_type = other RNA
tgcttacgatggagccagagag

SEQ ID NO: 8755 - RNA, 22 nt, synthetic construct
  source 1..22: mol_type = other RNA
tggagccagagaggatcctggg

SEQ ID NO: 8756 - RNA, 22 nt, synthetic construct
  source 1..22: mol_type = other RNA
tggagccatctctctccttgcc

SEQ ID NO: 8757 - RNA, 22 nt, synthetic construct
  source 1..22: mol_type = other RNA
tggcaaggagagagatggctcc

SEQ ID NO: 8758 - RNA, 22 nt, synthetic construct
  source 1..22: mol_type = other RNA
tggctccatcgtaagcaaacct

SEQ ID NO: 8759 - RNA, 22 nt, synthetic construct
  source 1..22: mol_type = other RNA
ttacgatggagccagagaggat

SEQ ID NO: 8760 - RNA, 22 nt, synthetic construct
  source 1..22: mol_type = other RNA
ttagaggttctggcaaggagag

SEQ ID NO: 8761 - RNA, 22 nt, synthetic construct
  source 1..22: mol_type = other RNA
ttcctggagccatctctctcct

SEQ ID NO: 8762 - RNA, 22 nt, synthetic construct
  source 1..22: mol_type = other RNA
ttctggcaaggagagagatggc

SEQ ID NO: 8763 - RNA, 22 nt, synthetic construct
  source 1..22: mol_type = other RNA
ttgccagaacctctaaggtttg

SEQ ID NO: 8764 - RNA, 22 nt, synthetic construct
  source 1..22: mol_type = other RNA
ttgcttacgatggagccagaga

SEQ ID NO: 8765 - RNA, 22 nt, synthetic construct
  source 1..22: mol_type = other RNA
tttcctggagccatctctctcc

SEQ ID NO: 8766 - RNA, 22 nt, synthetic construct
  source 1..22: mol_type = other RNA
tttgcttacgatggagccagag

SEQ ID NO: 8767 - RNA, 20 nt, synthetic construct
  source 1..20: mol_type = other RNA
aaaaacaaaatcagaataag

SEQ ID NO: 8768 - RNA, 20 nt, synthetic construct
  source 1..20: mol_type = other RNA
aaaacaaaatcagaataagt

SEQ ID NO: 8769 - RNA, 20 nt, synthetic construct
  source 1..20: mol_type = other RNA
aaaacagatccagggacacg

SEQ ID NO: 8770 - RNA, 20 nt, synthetic construct
  source 1..20: mol_type = other RNA
aaaacagggatggttggtca

SEQ ID NO: 8771 - RNA, 20 nt, synthetic construct
  source 1..20: mol_type = other RNA
aaaacccccgtcaccaccca

SEQ ID NO: 8772 - RNA, 20 nt, synthetic construct
  source 1..20: mol_type = other RNA
aaaactaggctgtcctgggc

SEQ ID NO: 8773 - RNA, 20 nt, synthetic construct
  source 1..20: mol_type = other RNA
aaaactccctttgtgagaat

SEQ ID NO: 8774 - RNA, 20 nt, synthetic construct
  source 1..20: mol_type = other RNA
aaaactgacgcacggaggaa

SEQ ID NO: 8775 - RNA, 20 nt, synthetic construct
  source 1..20: mol_type = other RNA
aaaacttggggggacaaaag

SEQ ID NO: 8776 - RNA, 20 nt, synthetic construct
  source 1..20: mol_type = other RNA
aaaagccgaagtccaggggg

SEQ ID NO: 8777 - RNA, 20 nt, synthetic construct
  source 1..20: mol_type = other RNA
aaaaggcagcctggtagaca

SEQ ID NO: 8778 - RNA, 20 nt, synthetic construct
  source 1..20: mol_type = other RNA
aaaatcagaataagttggtc

SEQ ID NO: 8779 - RNA, 20 nt, synthetic construct
  source 1..20: mol_type = other RNA
aaaatgacccaacagcctct

SEQ ID NO: 8780 - RNA, 20 nt, synthetic construct
  source 1..20: mol_type = other RNA
aaacaaaatcagaataagtt

SEQ ID NO: 8781 - RNA, 20 nt, synthetic construct
  source 1..20: mol_type = other RNA
aaacacagccccaggtggag

SEQ ID NO: 8782 - RNA, 20 nt, synthetic construct
  source 1..20: mol_type = other RNA
aaacagatccagggacacgg

SEQ ID NO: 8783 - RNA, 20 nt, synthetic construct
  source 1..20: mol_type = other RNA
aaacagcataagctggtcac

SEQ ID NO: 8784 - RNA, 20 nt, synthetic construct
  source 1..20: mol_type = other RNA
aaacagccagtggccagagg

SEQ ID NO: 8785 - RNA, 20 nt, synthetic construct
  source 1..20: mol_type = other RNA
aaacaggaagtgaacgggga

SEQ ID NO: 8786 - RNA, 20 nt, synthetic construct
  source 1..20: mol_type = other RNA
aaacagggatggttggtcac

SEQ ID NO: 8787 - RNA, 20 nt, synthetic construct
  source 1..20: mol_type = other RNA
aaaccaccccagcagatact

SEQ ID NO: 8788 - RNA, 20 nt, synthetic construct
  source 1..20: mol_type = other RNA
aaaccacgaaaggactcctg

SEQ ID NO: 8789 - RNA, 20 nt, synthetic construct
  source 1..20: mol_type = other RNA
aaacccacgtggggtaccct

SEQ ID NO: 8790 - RNA, 20 nt, synthetic construct
  source 1..20: mol_type = other RNA
aaacccagaagcccagagca

SEQ ID NO: 8791 - RNA, 20 nt, synthetic construct
  source 1..20: mol_type = other RNA
aaacccagccaggtccttcc

SEQ ID NO: 8792 - RNA, 20 nt, synthetic construct
  source 1..20: mol_type = other RNA
aaacccagctcccctgcttc

SEQ ID NO: 8793 - RNA, 20 nt, synthetic construct
  source 1..20: mol_type = other RNA
aaacccaggagcccaggccc

SEQ ID NO: 8794 - RNA, 20 nt, synthetic construct
  source 1..20: mol_type = other RNA
aaacccccgtcaccacccac

SEQ ID NO: 8795 - RNA, 20 nt, synthetic construct
  source 1..20: mol_type = other RNA
aaaccctcagtcctaggaaa

SEQ ID NO: 8796 - RNA, 20 nt, synthetic construct
  source 1..20: mol_type = other RNA
aaacgagccgagttcatccc

SEQ ID NO: 8797 - RNA, 20 nt, synthetic construct
  source 1..20: mol_type = other RNA
aaacgcaccagacggccgcg

SEQ ID NO: 8798 - RNA, 20 nt, synthetic construct
  source 1..20: mol_type = other RNA
aaacggtggcccgtgtcagc

SEQ ID NO: 8799 - RNA, 20 nt, synthetic construct
  source 1..20: mol_type = other RNA
aaactaggctgtcctgggca

SEQ ID NO: 8800 - RNA, 20 nt, synthetic construct
  source 1..20: mol_type = other RNA
aaactcactcttcggggtat

SEQ ID NO: 8801 - RNA, 20 nt, synthetic construct
  source 1..20: mol_type = other RNA
aaactccctttgtgagaatg

SEQ ID NO: 8802 - RNA, 20 nt, synthetic construct
  source 1..20: mol_type = other RNA
aaactcctagatccacggga

SEQ ID NO: 8803 - RNA, 20 nt, synthetic construct
  source 1..20: mol_type = other RNA
aaactcgggctgtgaagggg

SEQ ID NO: 8804 - RNA, 20 nt, synthetic construct
  source 1..20: mol_type = other RNA
aaactgacgcacggaggaac

SEQ ID NO: 8805 - RNA, 20 nt, synthetic construct
  source 1..20: mol_type = other RNA
aaactgcttctcctcttggg

SEQ ID NO: 8806 - RNA, 20 nt, synthetic construct
  source 1..20: mol_type = other RNA
aaactggccgggaatcaaga

SEQ ID NO: 8807 - RNA, 20 nt, synthetic construct
  source 1..20: mol_type = other RNA
aaacttggggggacaaaagc

SEQ ID NO: 8808 - RNA, 20 nt, synthetic construct
  source 1..20: mol_type = other RNA
aaagaaggatggagaaagag

SEQ ID NO: 8809 - RNA, 20 nt, synthetic construct
  source 1..20: mol_type = other RNA
aaagagaaagggagtagagg

SEQ ID NO: 8810 - RNA, 20 nt, synthetic construct
  source 1..20: mol_type = other RNA
aaagagtccccagtgctatc

SEQ ID NO: 8811 - RNA, 20 nt, synthetic construct
  source 1..20: mol_type = other RNA
aaagatgcctgaggcctggg

SEQ ID NO: 8812 - RNA, 20 nt, synthetic construct
  source 1..20: mol_type = other RNA
aaagccgaagtccagggggt

SEQ ID NO: 8813 - RNA, 20 nt, synthetic construct
  source 1..20: mol_type = other RNA
aaagctgcccatctggagga

SEQ ID NO: 8814 - RNA, 20 nt, synthetic construct
  source 1..20: mol_type = other RNA
aaaggactcctggctatctg

SEQ ID NO: 8815 - RNA, 20 nt, synthetic construct
  source 1..20: mol_type = other RNA
aaaggcagcctggtagacag

SEQ ID NO: 8816 - RNA, 20 nt, synthetic construct
  source 1..20: mol_type = other RNA
aaaggcccattgctctcctt

SEQ ID NO: 8817 - RNA, 20 nt, synthetic construct
  source 1..20: mol_type = other RNA
aaagggaaaggcccattgct

SEQ ID NO: 8818 - RNA, 20 nt, synthetic construct
  source 1..20: mol_type = other RNA
aaagggagtagaggcggcca

SEQ ID NO: 8819 - RNA, 20 nt, synthetic construct
  source 1..20: mol_type = other RNA
aaagggagttttccacacgg

SEQ ID NO: 8820 - RNA, 20 nt, synthetic construct
  source 1..20: mol_type = other RNA
aaaggtgaagagccaaagtt

SEQ ID NO: 8821 - RNA, 20 nt, synthetic construct
  source 1..20: mol_type = other RNA
aaagttagaactcaggacca

SEQ ID NO: 8822 - RNA, 20 nt, synthetic construct
  source 1..20: mol_type = other RNA
aaataaacgagccgagttca

SEQ ID NO: 8823 - RNA, 20 nt, synthetic construct
  source 1..20: mol_type = other RNA
aaatcagaataagttggtcc

SEQ ID NO: 8824 - RNA, 20 nt, synthetic construct
  source 1..20: mol_type = other RNA
aaatgacccaacagcctctg

SEQ ID NO: 8825 - RNA, 20 nt, synthetic construct
  source 1..20: mol_type = other RNA
aaattaccccccaagtccct

SEQ ID NO: 8826 - RNA, 20 nt, synthetic construct
  source 1..20: mol_type = other RNA
aaattggggactagaaaggt

SEQ ID NO: 8827 - RNA, 20 nt, synthetic construct
  source 1..20: mol_type = other RNA
aacaaaatcagaataagttg

SEQ ID NO: 8828 - RNA, 20 nt, synthetic construct
  source 1..20: mol_type = other RNA
aacaatataaattggggact

SEQ ID NO: 8829 - RNA, 20 nt, synthetic construct
  source 1..20: mol_type = other RNA
aacacagccccaggtggaga

SEQ ID NO: 8830 - RNA, 20 nt, synthetic construct
  source 1..20: mol_type = other RNA
aacacctaggacgcaccatt

SEQ ID NO: 8831 - RNA, 20 nt, synthetic construct
  source 1..20: mol_type = other RNA
aacagagaagagctgggggc

SEQ ID NO: 8832 - RNA, 20 nt, synthetic construct
  source 1..20: mol_type = other RNA
aacagatccagggacacggt

SEQ ID NO: 8833 - RNA, 20 nt, synthetic construct
  source 1..20: mol_type = other RNA
aacagcataagctggtcacc

SEQ ID NO: 8834 - RNA, 20 nt, synthetic construct
  source 1..20: mol_type = other RNA
aacagccacagcaggggggc

SEQ ID NO: 8835 - RNA, 20 nt, synthetic construct
  source 1..20: mol_type = other RNA
aacagccagtggccagaggc

SEQ ID NO: 8836 - RNA, 20 nt, synthetic construct
  source 1..20: mol_type = other RNA
aacagcctctggccactggc

SEQ ID NO: 8837 - RNA, 20 nt, synthetic construct
  source 1..20: mol_type = other RNA
aacaggaagtgaacggggaa

SEQ ID NO: 8838 - RNA, 20 nt, synthetic construct
  source 1..20: mol_type = other RNA
aacagggatggttggtcact

SEQ ID NO: 8839 - RNA, 20 nt, synthetic construct
  source 1..20: mol_type = other RNA
aacaggtaccatgtggggtt

SEQ ID NO: 8840 - RNA, 20 nt, synthetic construct
  source 1..20: mol_type = other RNA
aaccaccccagcagatactc

SEQ ID NO: 8841 - RNA, 20 nt, synthetic construct
  source 1..20: mol_type = other RNA
aaccacgaaaggactcctgg

SEQ ID NO: 8842 - RNA, 20 nt, synthetic construct
  source 1..20: mol_type = other RNA
aaccacttggtgaggctggt

SEQ ID NO: 8843 - RNA, 20 nt, synthetic construct
  source 1..20: mol_type = other RNA
aaccaggcgtatcttaaaca

SEQ ID NO: 8844 - RNA, 20 nt, synthetic construct
  source 1..20: mol_type = other RNA
aaccatccctgttttcctag

SEQ ID NO: 8845 - RNA, 20 nt, synthetic construct
  source 1..20: mol_type = other RNA
aacccacgtggggtacccta

SEQ ID NO: 8846 - RNA, 20 nt, synthetic construct
  source 1..20: mol_type = other RNA
aacccagaagcccagagcag

SEQ ID NO: 8847 - RNA, 20 nt, synthetic construct
  source 1..20: mol_type = other RNA
aacccagccaggtccttcca

SEQ ID NO: 8848 - RNA, 20 nt, synthetic construct
  source 1..20: mol_type = other RNA
aacccagctcccctgcttct

SEQ ID NO: 8849 - RNA, 20 nt, synthetic construct
  source 1..20: mol_type = other RNA
aacccaggagcccaggcccc

SEQ ID NO: 8850 - RNA, 20 nt, synthetic construct
  source 1..20: mol_type = other RNA
aacccaggaggccaggcccc

SEQ ID NO: 8851 - RNA, 20 nt, synthetic construct
  source 1..20: mol_type = other RNA
aaccccacatggtacctgtt

SEQ ID NO: 8852 - RNA, 20 nt, synthetic construct
  source 1..20: mol_type = other RNA
aaccccagcccaccccaatg

SEQ ID NO: 8853 - RNA, 20 nt, synthetic construct
  source 1..20: mol_type = other RNA
aacccccgtcaccacccaca

SEQ ID NO: 8854 - RNA, 20 nt, synthetic construct
  source 1..20: mol_type = other RNA
aaccccctagccactaaggc

SEQ ID NO: 8855 - RNA, 20 nt, synthetic construct
  source 1..20: mol_type = other RNA
aacccctccccattcaaccc

SEQ ID NO: 8856 - RNA, 20 nt, synthetic construct
  source 1..20: mol_type = other RNA
aacccctgtagggaaggggc

SEQ ID NO: 8857 - RNA, 20 nt, synthetic construct
  source 1..20: mol_type = other RNA
aaccctcagtcctaggaaaa

SEQ ID NO: 8858 - RNA, 20 nt, synthetic construct
  source 1..20: mol_type = other RNA
aacctcttccctagtctgag

SEQ ID NO: 8859 - RNA, 20 nt, synthetic construct
  source 1..20: mol_type = other RNA
aacctgagaagggaatccct

SEQ ID NO: 8860 - RNA, 20 nt, synthetic construct
  source 1..20: mol_type = other RNA
aacctgagctgctctgacgc

SEQ ID NO: 8861 - RNA, 20 nt, synthetic construct
  source 1..20: mol_type = other RNA
aacgaagccgtgggcccagg

SEQ ID NO: 8862 - RNA, 20 nt, synthetic construct
  source 1..20: mol_type = other RNA
aacgagccgagttcatcccg

SEQ ID NO: 8863 - RNA, 20 nt, synthetic construct
  source 1..20: mol_type = other RNA
aacgcaccagacggccgcgt

SEQ ID NO: 8864 - RNA, 20 nt, synthetic construct
  source 1..20: mol_type = other RNA
aacgggatgaactcggctcg

SEQ ID NO: 8865 - RNA, 20 nt, synthetic construct
  source 1..20: mol_type = other RNA
aacggggaagggagggggct

SEQ ID NO: 8866 - RNA, 20 nt, synthetic construct
  source 1..20: mol_type = other RNA
aacggggatgcaggggaacg

SEQ ID NO: 8867 - RNA, 20 nt, synthetic construct
  source 1..20: mol_type = other RNA
aacggggctcagtctgaaga

SEQ ID NO: 8868 - RNA, 20 nt, synthetic construct
  source 1..20: mol_type = other RNA
aacggtggcccgtgtcagcc

SEQ ID NO: 8869 - RNA, 20 nt, synthetic construct
  source 1..20: mol_type = other RNA
aactaggctgtcctgggcaa

SEQ ID NO: 8870 - RNA, 20 nt, synthetic construct
  source 1..20: mol_type = other RNA
aactcactcttcggggtatc

SEQ ID NO: 8871 - RNA, 20 nt, synthetic construct
  source 1..20: mol_type = other RNA
aactcaggaccaacttattc

SEQ ID NO: 8872 - RNA, 20 nt, synthetic construct
  source 1..20: mol_type = other RNA
aactccctttgtgagaatgg

SEQ ID NO: 8873 - RNA, 20 nt, synthetic construct
  source 1..20: mol_type = other RNA
aactcctagatccacgggat

SEQ ID NO: 8874 - RNA, 20 nt, synthetic construct
  source 1..20: mol_type = other RNA
aactcggctcgtttatttcc

SEQ ID NO: 8875 - RNA, 20 nt, synthetic construct
  source 1..20: mol_type = other RNA
aactcgggctgtgaaggggc

SEQ ID NO: 8876 - RNA, 20 nt, synthetic construct
  source 1..20: mol_type = other RNA
aactgacgcacggaggaaca

SEQ ID NO: 8877 - RNA, 20 nt, synthetic construct
  source 1..20: mol_type = other RNA
aactgcttctcctcttggga

SEQ ID NO: 8878 - RNA, 20 nt, synthetic construct
  source 1..20: mol_type = other RNA
aactggagctgaggaaggag

SEQ ID NO: 8879 - RNA, 20 nt, synthetic construct
  source 1..20: mol_type = other RNA
aactggagtgtgacagcctg

SEQ ID NO: 8880 - RNA, 20 nt, synthetic construct
  source 1..20: mol_type = other RNA
aactggccgggaatcaagag

SEQ ID NO: 8881 - RNA, 20 nt, synthetic construct
  source 1..20: mol_type = other RNA
aactgggtggaaataaacga

SEQ ID NO: 8882 - RNA, 20 nt, synthetic construct
  source 1..20: mol_type = other RNA
aactgtggggtgactgcttg

SEQ ID NO: 8883 - RNA, 20 nt, synthetic construct
  source 1..20: mol_type = other RNA
aacttattctgattttgttt

SEQ ID NO: 8884 - RNA, 20 nt, synthetic construct
  source 1..20: mol_type = other RNA
aacttgggaacagccacagc

SEQ ID NO: 8885 - RNA, 20 nt, synthetic construct
  source 1..20: mol_type = other RNA
aacttggggggacaaaagcc

SEQ ID NO: 8886 - RNA, 20 nt, synthetic construct
  source 1..20: mol_type = other RNA
aactttggctcttcaccttt

SEQ ID NO: 8887 - RNA, 20 nt, synthetic construct
  source 1..20: mol_type = other RNA
aagaacttgggaacagccac

SEQ ID NO: 8888 - RNA, 20 nt, synthetic construct
  source 1..20: mol_type = other RNA
aagaagcaggggagctgggt

SEQ ID NO: 8889 - RNA, 20 nt, synthetic construct
  source 1..20: mol_type = other RNA
aagaaggatggagaaagaga

SEQ ID NO: 8890 - RNA, 20 nt, synthetic construct
  source 1..20: mol_type = other RNA
aagaatcctggctccagccc

SEQ ID NO: 8891 - RNA, 20 nt, synthetic construct
  source 1..20: mol_type = other RNA
aagaatgagaaacggtggcc

SEQ ID NO: 8892 - RNA, 20 nt, synthetic construct
  source 1..20: mol_type = other RNA
aagacccagaagtccaggcc

SEQ ID NO: 8893 - RNA, 20 nt, synthetic construct
  source 1..20: mol_type = other RNA
aagagaaagggagtagaggc

SEQ ID NO: 8894 - RNA, 20 nt, synthetic construct
  source 1..20: mol_type = other RNA
aagagcagagccaggaaccc

SEQ ID NO: 8895 - RNA, 20 nt, synthetic construct
  source 1..20: mol_type = other RNA
aagagcatgaggtcatggaa

SEQ ID NO: 8896 - RNA, 20 nt, synthetic construct
  source 1..20: mol_type = other RNA
aagagccaaagttagaactc

SEQ ID NO: 8897 - RNA, 20 nt, synthetic construct
  source 1..20: mol_type = other RNA
aagagctgggggcctgggct

SEQ ID NO: 8898 - RNA, 20 nt, synthetic construct
  source 1..20: mol_type = other RNA
aagaggagaagcagtttgga

SEQ ID NO: 8899 - RNA, 20 nt, synthetic construct
  source 1..20: mol_type = other RNA
aagaggttccagcccctcct

SEQ ID NO: 8900 - RNA, 20 nt, synthetic construct
  source 1..20: mol_type = other RNA
aagagtcacccagagacagt

SEQ ID NO: 8901 - RNA, 20 nt, synthetic construct
  source 1..20: mol_type = other RNA
aagagtccccagtgctatct

SEQ ID NO: 8902 - RNA, 20 nt, synthetic construct
  source 1..20: mol_type = other RNA
aagagtgagtttgccaagca

SEQ ID NO: 8903 - RNA, 20 nt, synthetic construct
  source 1..20: mol_type = other RNA
aagatacgcctggttgccca

SEQ ID NO: 8904 - RNA, 20 nt, synthetic construct
  source 1..20: mol_type = other RNA
aagatgcctgaggcctgggc

SEQ ID NO: 8905 - RNA, 20 nt, synthetic construct
  source 1..20: mol_type = other RNA
aagcaggggagctgggtttg

SEQ ID NO: 8906 - RNA, 20 nt, synthetic construct
  source 1..20: mol_type = other RNA
aagcagtcaccccacagttg

SEQ ID NO: 8907 - RNA, 20 nt, synthetic construct
  source 1..20: mol_type = other RNA
aagcagtttggaaaaacaaa

SEQ ID NO: 8908 - RNA, 20 nt, synthetic construct
  source 1..20: mol_type = other RNA
aagcatcgcccccctgctgt

SEQ ID NO: 8909 - RNA, 20 nt, synthetic construct
  source 1..20: mol_type = other RNA
aagcccagagcagggcctta

SEQ ID NO: 8910 - RNA, 20 nt, synthetic construct
  source 1..20: mol_type = other RNA
aagcccaggagaggcgctca

SEQ ID NO: 8911 - RNA, 20 nt, synthetic construct
  source 1..20: mol_type = other RNA
aagccccctcccttccccgt

SEQ ID NO: 8912 - RNA, 20 nt, synthetic construct
  source 1..20: mol_type = other RNA
aagccgaagtccagggggtc

SEQ ID NO: 8913 - RNA, 20 nt, synthetic construct
  source 1..20: mol_type = other RNA
aagccgtgggcccagggcta

SEQ ID NO: 8914 - RNA, 20 nt, synthetic construct
  source 1..20: mol_type = other RNA
aagcctgagcgcctctcctg

SEQ ID NO: 8915 - RNA, 20 nt, synthetic construct
  source 1..20: mol_type = other RNA
aagcgccacctgtgggtggt

SEQ ID NO: 8916 - RNA, 20 nt, synthetic construct
  source 1..20: mol_type = other RNA
aagcgggaccctgctctggg

SEQ ID NO: 8917 - RNA, 20 nt, synthetic construct
  source 1..20: mol_type = other RNA
aagctaaactcctagatcca

SEQ ID NO: 8918 - RNA, 20 nt, synthetic construct
  source 1..20: mol_type = other RNA
aagctcggaaaccaccccag

SEQ ID NO: 8919 - RNA, 20 nt, synthetic construct
  source 1..20: mol_type = other RNA
aagctgcagcaccaggatca

SEQ ID NO: 8920 - RNA, 20 nt, synthetic construct
  source 1..20: mol_type = other RNA
aagctgcccatctggaggag

SEQ ID NO: 8921 - RNA, 20 nt, synthetic construct
  source 1..20: mol_type = other RNA
aagctggtcaccccacaccc

SEQ ID NO: 8922 - RNA, 20 nt, synthetic construct
  source 1..20: mol_type = other RNA
aaggaaagaaggatggagaa

SEQ ID NO: 8923 - RNA, 20 nt, synthetic construct
  source 1..20: mol_type = other RNA
aaggaagctgcagcaccagg

SEQ ID NO: 8924 - RNA, 20 nt, synthetic construct
  source 1..20: mol_type = other RNA
aaggacctgcccagtacagg

SEQ ID NO: 8925 - RNA, 20 nt, synthetic construct
  source 1..20: mol_type = other RNA
aaggacctggctgggtttaa

SEQ ID NO: 8926 - RNA, 20 nt, synthetic construct
  source 1..20: mol_type = other RNA
aaggactcaaacccagaagc

SEQ ID NO: 8927 - RNA, 20 nt, synthetic construct
  source 1..20: mol_type = other RNA
aaggactcctggctatctgc

SEQ ID NO: 8928 - RNA, 20 nt, synthetic construct
  source 1..20: mol_type = other RNA
aaggagagcaatgggccttt

SEQ ID NO: 8929 - RNA, 20 nt, synthetic construct
  source 1..20: mol_type = other RNA
aaggaggaggggctggaacc

SEQ ID NO: 8930 - RNA, 20 nt, synthetic construct
  source 1..20: mol_type = other RNA
aaggagtccaggcccccagc

SEQ ID NO: 8931 - RNA, 20 nt, synthetic construct
  source 1..20: mol_type = other RNA
aaggagtgaagctaaactcc

SEQ ID NO: 8932 - RNA, 20 nt, synthetic construct
  source 1..20: mol_type = other RNA
aaggatgcaggacgagaaac

SEQ ID NO: 8933 - RNA, 20 nt, synthetic construct
  source 1..20: mol_type = other RNA
aaggatggagaaagagaaag

SEQ ID NO: 8934 - RNA, 20 nt, synthetic construct
  source 1..20: mol_type = other RNA
aaggcaattggggtgcagga

SEQ ID NO: 8935 - RNA, 20 nt, synthetic construct
  source 1..20: mol_type = other RNA
aaggcagcctggtagacagg

SEQ ID NO: 8936 - RNA, 20 nt, synthetic construct
  source 1..20: mol_type = other RNA
aaggcaggaggggctggggg

SEQ ID NO: 8937 - RNA, 20 nt, synthetic construct
  source 1..20: mol_type = other RNA
aaggccaccctgtgctggga

SEQ ID NO: 8938 - RNA, 20 nt, synthetic construct
  source 1..20: mol_type = other RNA
aaggccagtagccagccccg

SEQ ID NO: 8939 - RNA, 20 nt, synthetic construct
  source 1..20: mol_type = other RNA
aaggcccattgctctccttg

SEQ ID NO: 8940 - RNA, 20 nt, synthetic construct
  source 1..20: mol_type = other RNA
aaggccctgctctgggcttc

SEQ ID NO: 8941 - RNA, 20 nt, synthetic construct
  source 1..20: mol_type = other RNA
aaggcctggccggcctgacc

SEQ ID NO: 8942 - RNA, 20 nt, synthetic construct
  source 1..20: mol_type = other RNA
aaggcctggggcaagtccct

SEQ ID NO: 8943 - RNA, 20 nt, synthetic construct
  source 1..20: mol_type = other RNA
aagggaaaggcccattgctc

SEQ ID NO: 8944 - RNA, 20 nt, synthetic construct
  source 1..20: mol_type = other RNA
aagggaagaatgagaaacgg

SEQ ID NO: 8945 - RNA, 20 nt, synthetic construct
  source 1..20: mol_type = other RNA
aagggaatccctcctctctg

SEQ ID NO: 8946 - RNA, 20 nt, synthetic construct
  source 1..20: mol_type = other RNA
aagggagggggcttctcatc

SEQ ID NO: 8947 - RNA, 20 nt, synthetic construct
  source 1..20: mol_type = other RNA
aagggagtagaggcggccac

SEQ ID NO: 8948 - RNA, 20 nt, synthetic construct
  source 1..20: mol_type = other RNA
aagggagttttccacacgga

SEQ ID NO: 8949 - RNA, 20 nt, synthetic construct
  source 1..20: mol_type = other RNA
aagggctggggcctggcctc

SEQ ID NO: 8950 - RNA, 20 nt, synthetic construct
  source 1..20: mol_type = other RNA
aaggggcaggagagccaggg

SEQ ID NO: 8951 - RNA, 20 nt, synthetic construct
  source 1..20: mol_type = other RNA
aaggggccgcacgtgccctg

SEQ ID NO: 8952 - RNA, 20 nt, synthetic construct
  source 1..20: mol_type = other RNA
aagggggacagggaagcctg

SEQ ID NO: 8953 - RNA, 20 nt, synthetic construct
  source 1..20: mol_type = other RNA
aagggggatgcaggggaacg

SEQ ID NO: 8954 - RNA, 20 nt, synthetic construct
  source 1..20: mol_type = other RNA
aagggtcaagctcggaaacc

SEQ ID NO: 8955 - RNA, 20 nt, synthetic construct
  source 1..20: mol_type = other RNA
aaggtgaagagccaaagtta

SEQ ID NO: 8956 - RNA, 20 nt, synthetic construct
  source 1..20: mol_type = other RNA
aagtaggtggcctggggcct

SEQ ID NO: 8957 - RNA, 20 nt, synthetic construct
  source 1..20: mol_type = other RNA
aagtccagggggtcggagga

SEQ ID NO: 8958 - RNA, 20 nt, synthetic construct
  source 1..20: mol_type = other RNA
aagtccctcacctctccaaa

SEQ ID NO: 8959 - RNA, 20 nt, synthetic construct
  source 1..20: mol_type = other RNA
aagtccctcctccgaccccc

SEQ ID NO: 8960 - RNA, 20 nt, synthetic construct
  source 1..20: mol_type = other RNA
aagtcgggactccagaggga

SEQ ID NO: 8961 - RNA, 20 nt, synthetic construct
  source 1..20: mol_type = other RNA
aagtgaacggggaagggagg

SEQ ID NO: 8962 - RNA, 20 nt, synthetic construct
  source 1..20: mol_type = other RNA
aagtggttgataaacccacg

SEQ ID NO: 8963 - RNA, 20 nt, synthetic construct
  source 1..20: mol_type = other RNA
aagtgtaaggaagctgcagc

SEQ ID NO: 8964 - RNA, 20 nt, synthetic construct
  source 1..20: mol_type = other RNA
aagttagaactcaggaccaa

SEQ ID NO: 8965 - RNA, 20 nt, synthetic construct
  source 1..20: mol_type = other RNA
aagttcttagggtaccccac

SEQ ID NO: 8966 - RNA, 20 nt, synthetic construct
  source 1..20: mol_type = other RNA
aagttggtcctgagttctaa

SEQ ID NO: 8967 - RNA, 20 nt, synthetic construct
  source 1..20: mol_type = other RNA
aagttttggacccctaaggg

SEQ ID NO: 8968 - RNA, 20 nt, synthetic construct
  source 1..20: mol_type = other RNA
aataaacgagccgagttcat

SEQ ID NO: 8969 - RNA, 20 nt, synthetic construct
  source 1..20: mol_type = other RNA
aataagttggtcctgagttc

SEQ ID NO: 8970 - RNA, 20 nt, synthetic construct
  source 1..20: mol_type = other RNA
aatataaattggggactaga

SEQ ID NO: 8971 - RNA, 20 nt, synthetic construct
  source 1..20: mol_type = other RNA
aatatgtcccagatagcact

SEQ ID NO: 8972 - RNA, 20 nt, synthetic construct
  source 1..20: mol_type = other RNA
aatcaagagtcacccagaga

SEQ ID NO: 8973 - RNA, 20 nt, synthetic construct
  source 1..20: mol_type = other RNA
aatcagaataagttggtcct

SEQ ID NO: 8974 - RNA, 20 nt, synthetic construct
  source 1..20: mol_type = other RNA
aatccacccaaaaggcagcc

SEQ ID NO: 8975 - RNA, 20 nt, synthetic construct
  source 1..20: mol_type = other RNA
aatccctcctctctgaaccc

SEQ ID NO: 8976 - RNA, 20 nt, synthetic construct
  source 1..20: mol_type = other RNA
aatcctggctccagcccctc

SEQ ID NO: 8977 - RNA, 20 nt, synthetic construct
  source 1..20: mol_type = other RNA
aatgacccaacagcctctgg

SEQ ID NO: 8978 - RNA, 20 nt, synthetic construct
  source 1..20: mol_type = other RNA
aatgagaaacggtggcccgt

SEQ ID NO: 8979 - RNA, 20 nt, synthetic construct
  source 1..20: mol_type = other RNA
aatgctccaggcctcctggg

SEQ ID NO: 8980 - RNA, 20 nt, synthetic construct
  source 1..20: mol_type = other RNA
aatgggcctttccctttcaa

SEQ ID NO: 8981 - RNA, 20 nt, synthetic construct
  source 1..20: mol_type = other RNA
aatggggagaggctgggggc

SEQ ID NO: 8982 - RNA, 20 nt, synthetic construct
  source 1..20: mol_type = other RNA
aatggggaggggttgggcct

SEQ ID NO: 8983 - RNA, 20 nt, synthetic construct
  source 1..20: mol_type = other RNA
aatgggggcagggtaccagc

SEQ ID NO: 8984 - RNA, 20 nt, synthetic construct
  source 1..20: mol_type = other RNA
aatggtgcgtcctaggtgtt

SEQ ID NO: 8985 - RNA, 20 nt, synthetic construct
  source 1..20: mol_type = other RNA
aattaccccccaagtccctc

SEQ ID NO: 8986 - RNA, 20 nt, synthetic construct
  source 1..20: mol_type = other RNA
aattgccttagtggctaggg

SEQ ID NO: 8987 - RNA, 20 nt, synthetic construct
  source 1..20: mol_type = other RNA
aattggggactagaaaggtg

SEQ ID NO: 8988 - RNA, 20 nt, synthetic construct
  source 1..20: mol_type = other RNA
aattggggtgcaggaatggg

SEQ ID NO: 8989 - RNA, 20 nt, synthetic construct
  source 1..20: mol_type = other RNA
aatttatattgttcctccgt

SEQ ID NO: 8990 - RNA, 20 nt, synthetic construct
  source 1..20: mol_type = other RNA
aatttatcccgtggatctag

SEQ ID NO: 8991 - RNA, 20 nt, synthetic construct
  source 1..20: mol_type = other RNA
acaaaagccgaagtccaggg

SEQ ID NO: 8992 - RNA, 20 nt, synthetic construct
  source 1..20: mol_type = other RNA
acaaaatcagaataagttgg

SEQ ID NO: 8993 - RNA, 20 nt, synthetic construct
  source 1..20: mol_type = other RNA
acaaagggagttttccacac

SEQ ID NO: 8994 - RNA, 20 nt, synthetic construct
  source 1..20: mol_type = other RNA
acaactgggtggaaataaac

SEQ ID NO: 8995 - RNA, 20 nt, synthetic construct
  source 1..20: mol_type = other RNA
acaaggcctggggcaagtcc

SEQ ID NO: 8996 - RNA, 20 nt, synthetic construct
  source 1..20: mol_type = other RNA
acaatataaattggggacta

SEQ ID NO: 8997 - RNA, 20 nt, synthetic construct
  source 1..20: mol_type = other RNA
acacagccccaggtggagaa

SEQ ID NO: 8998 - RNA, 20 nt, synthetic construct
  source 1..20: mol_type = other RNA
acacaggtgtgcagctgtct

SEQ ID NO: 8999 - RNA, 20 nt, synthetic construct
  source 1..20: mol_type = other RNA
acacccagacctgacccaaa

SEQ ID NO: 9000 - RNA, 20 nt, synthetic construct
  source 1..20: mol_type = other RNA
acacccccctcctcaccaca

SEQ ID NO: 9001 - RNA, 20 nt, synthetic construct
  source 1..20: mol_type = other RNA
acacctaggacgcaccattc

SEQ ID NO: 9002 - RNA, 20 nt, synthetic construct
  source 1..20: mol_type = other RNA
acacctgtgtgcctgggccc

SEQ ID NO: 9003 - RNA, 20 nt, synthetic construct
  source 1..20: mol_type = other RNA
acacggacacccccctcctc

SEQ ID NO: 9004 - RNA, 20 nt, synthetic construct
  source 1..20: mol_type = other RNA
acacggcaaaacccccgtca

SEQ ID NO: 9005 - RNA, 20 nt, synthetic construct
  source 1..20: mol_type = other RNA
acacgggccaccgtttctca

SEQ ID NO: 9006 - RNA, 20 nt, synthetic construct
  source 1..20: mol_type = other RNA
acacggtgctaggacagtgg

SEQ ID NO: 9007 - RNA, 20 nt, synthetic construct
  source 1..20: mol_type = other RNA
acactccagttcactgaggc

SEQ ID NO: 9008 - RNA, 20 nt, synthetic construct
  source 1..20: mol_type = other RNA
acactgggtgggctccggga

SEQ ID NO: 9009 - RNA, 20 nt, synthetic construct
  source 1..20: mol_type = other RNA
acacttcccaagaggagaag

SEQ ID NO: 9010 - RNA, 20 nt, synthetic construct
  source 1..20: mol_type = other RNA
acagactcaggggcctgggc

SEQ ID NO: 9011 - RNA, 20 nt, synthetic construct
  source 1..20: mol_type = other RNA
acagagaagagctgggggcc

SEQ ID NO: 9012 - RNA, 20 nt, synthetic construct
  source 1..20: mol_type = other RNA
acagatccagggacacggtg

SEQ ID NO: 9013 - RNA, 20 nt, synthetic construct
  source 1..20: mol_type = other RNA
acagcaggggggcgatgctt

SEQ ID NO: 9014 - RNA, 20 nt, synthetic construct
  source 1..20: mol_type = other RNA
acagcataagctggtcaccc

SEQ ID NO: 9015 - RNA, 20 nt, synthetic construct
  source 1..20: mol_type = other RNA
acagccacagcaggggggcg

SEQ ID NO: 9016 - RNA, 20 nt, synthetic construct
  source 1..20: mol_type = other RNA
acagccagtggccagaggct

SEQ ID NO: 9017 - RNA, 20 nt, synthetic construct
  source 1..20: mol_type = other RNA
acagccccaggtggagaaac

SEQ ID NO: 9018 - RNA, 20 nt, synthetic construct
  source 1..20: mol_type = other RNA
acagcccgagtttccatgac

SEQ ID NO: 9019 - RNA, 20 nt, synthetic construct
  source 1..20: mol_type = other RNA
acagccctgccaggacgggg

SEQ ID NO: 9020 - RNA, 20 nt, synthetic construct
  source 1..20: mol_type = other RNA
acagcctagttttagcactg

SEQ ID NO: 9021 - RNA, 20 nt, synthetic construct
  source 1..20: mol_type = other RNA
acagcctctggccactggct

SEQ ID NO: 9022 - RNA, 20 nt, synthetic construct
  source 1..20: mol_type = other RNA
acagcctggggcccaggcac

SEQ ID NO: 9023 - RNA, 20 nt, synthetic construct
  source 1..20: mol_type = other RNA
acagctgcacacctgtgtgc

SEQ ID NO: 9024 - RNA, 20 nt, synthetic construct
  source 1..20: mol_type = other RNA
acaggaagtgaacggggaag

SEQ ID NO: 9025 - RNA, 20 nt, synthetic construct
  source 1..20: mol_type = other RNA
acaggcatccctgtgaaaga

SEQ ID NO: 9026 - RNA, 20 nt, synthetic construct
  source 1..20: mol_type = other RNA
acagggaagcctgagcgcct

SEQ ID NO: 9027 - RNA, 20 nt, synthetic construct
  source 1..20: mol_type = other RNA
acagggatgcctgtactggg

SEQ ID NO: 9028 - RNA, 20 nt, synthetic construct
  source 1..20: mol_type = other RNA
acagggatggttggtcactg

SEQ ID NO: 9029 - RNA, 20 nt, synthetic construct
  source 1..20: mol_type = other RNA
acagggctggggtggcctct

SEQ ID NO: 9030 - RNA, 20 nt, synthetic construct
  source 1..20: mol_type = other RNA
acaggggttcctggctctgc

SEQ ID NO: 9031 - RNA, 20 nt, synthetic construct
  source 1..20: mol_type = other RNA
acagggtggccttcctccac

SEQ ID NO: 9032 - RNA, 20 nt, synthetic construct
  source 1..20: mol_type = other RNA
acaggtaaaactgacgcacg

SEQ ID NO: 9033 - RNA, 20 nt, synthetic construct
  source 1..20: mol_type = other RNA
acaggtaccatgtggggttc

SEQ ID NO: 9034 - RNA, 20 nt, synthetic construct
  source 1..20: mol_type = other RNA
acaggtggcgcttccagtgc

SEQ ID NO: 9035 - RNA, 20 nt, synthetic construct
  source 1..20: mol_type = other RNA
acaggtgtgcagctgtctca

SEQ ID NO: 9036 - RNA, 20 nt, synthetic construct
  source 1..20: mol_type = other RNA
acagtgaccaaccatccctg

SEQ ID NO: 9037 - RNA, 20 nt, synthetic construct
  source 1..20: mol_type = other RNA
acagtggggaaaatgaccca

SEQ ID NO: 9038 - RNA, 20 nt, synthetic construct
  source 1..20: mol_type = other RNA
acagttggaggagaatccac

SEQ ID NO: 9039 - RNA, 20 nt, synthetic construct
  source 1..20: mol_type = other RNA
acatattcctccgcccagag

SEQ ID NO: 9040 - RNA, 20 nt, synthetic construct
  source 1..20: mol_type = other RNA
acatggtacctgttagacac

SEQ ID NO: 9041 - RNA, 20 nt, synthetic construct
  source 1..20: mol_type = other RNA
accaaccatccctgttttcc

SEQ ID NO: 9042 - RNA, 20 nt, synthetic construct
  source 1..20: mol_type = other RNA
accaacttattctgattttg

SEQ ID NO: 9043 - RNA, 20 nt, synthetic construct
  source 1..20: mol_type = other RNA
accaagtggttgataaaccc

SEQ ID NO: 9044 - RNA, 20 nt, synthetic construct
  source 1..20: mol_type = other RNA
accacagccctgccaggacg

SEQ ID NO: 9045 - RNA, 20 nt, synthetic construct
  source 1..20: mol_type = other RNA
accacccacaggtggcgctt

SEQ ID NO: 9046 - RNA, 20 nt, synthetic construct
  source 1..20: mol_type = other RNA
accaccccagcagatactct

SEQ ID NO: 9047 - RNA, 20 nt, synthetic construct
  source 1..20: mol_type = other RNA
accacgaaaggactcctggc

SEQ ID NO: 9048 - RNA, 20 nt, synthetic construct
  source 1..20: mol_type = other RNA
accactgggcaaccaggcgt

SEQ ID NO: 9049 - RNA, 20 nt, synthetic construct
  source 1..20: mol_type = other RNA
accacttggtgaggctggta

SEQ ID NO: 9050 - RNA, 20 nt, synthetic construct
  source 1..20: mol_type = other RNA
accagacggccgcgtcagag

SEQ ID NO: 9051 - RNA, 20 nt, synthetic construct
  source 1..20: mol_type = other RNA
accagcctcaccaagtggtt

SEQ ID NO: 9052 - RNA, 20 nt, synthetic construct
  source 1..20: mol_type = other RNA
accagcttatgctgtttgcc

SEQ ID NO: 9053 - RNA, 20 nt, synthetic construct
  source 1..20: mol_type = other RNA
accaggatcagtgaaacgca

SEQ ID NO: 9054 - RNA, 20 nt, synthetic construct
  source 1..20: mol_type = other RNA
accaggcgtatcttaaacag

SEQ ID NO: 9055 - RNA, 20 nt, synthetic construct
  source 1..20: mol_type = other RNA
accaggctgccttttgggtg

SEQ ID NO: 9056 - RNA, 20 nt, synthetic construct
  source 1..20: mol_type = other RNA
accagggactccagagtcca

SEQ ID NO: 9057 - RNA, 20 nt, synthetic construct
  source 1..20: mol_type = other RNA
accaggtcgtggccgcctct

SEQ ID NO: 9058 - RNA, 20 nt, synthetic construct
  source 1..20: mol_type = other RNA
accatccctgttttcctagg

SEQ ID NO: 9059 - RNA, 20 nt, synthetic construct
  source 1..20: mol_type = other RNA
accatctcatgcccctggct

SEQ ID NO: 9060 - RNA, 20 nt, synthetic construct
  source 1..20: mol_type = other RNA
accatgtggggttcccgcac

SEQ ID NO: 9061 - RNA, 20 nt, synthetic construct
  source 1..20: mol_type = other RNA
accattctcacaaagggagt

SEQ ID NO: 9062 - RNA, 20 nt, synthetic construct
  source 1..20: mol_type = other RNA
acccaaaaggcagcctggta

SEQ ID NO: 9063 - RNA, 20 nt, synthetic construct
  source 1..20: mol_type = other RNA
acccaaacccagctcccctg

SEQ ID NO: 9064 - RNA, 20 nt, synthetic construct
  source 1..20: mol_type = other RNA
acccaacagcctctggccac

SEQ ID NO: 9065 - RNA, 20 nt, synthetic construct
  source 1..20: mol_type = other RNA
acccacaggtggcgcttcca

SEQ ID NO: 9066 - RNA, 20 nt, synthetic construct
  source 1..20: mol_type = other RNA
acccacgagtccaggcccca

SEQ ID NO: 9067 - RNA, 20 nt, synthetic construct
  source 1..20: mol_type = other RNA
acccacgtggggtaccctaa

SEQ ID NO: 9068 - RNA, 20 nt, synthetic construct
  source 1..20: mol_type = other RNA
acccagaagcccagagcagg

SEQ ID NO: 9069 - RNA, 20 nt, synthetic construct
  source 1..20: mol_type = other RNA
acccagacctgacccaaacc

SEQ ID NO: 9070 - RNA, 20 nt, synthetic construct
  source 1..20: mol_type = other RNA
acccagagacagtgaccaac

SEQ ID NO: 9071 - RNA, 20 nt, synthetic construct
  source 1..20: mol_type = other RNA
acccagatgagaagccccct

SEQ ID NO: 9072 - RNA, 20 nt, synthetic construct
  source 1..20: mol_type = other RNA
acccagccaggtccttccaa

SEQ ID NO: 9073 - RNA, 20 nt, synthetic construct
  source 1..20: mol_type = other RNA
acccagctcccctgcttctt

SEQ ID NO: 9074 - RNA, 20 nt, synthetic construct
  source 1..20: mol_type = other RNA
acccaggagcccaggccccc

SEQ ID NO: 9075 - RNA, 20 nt, synthetic construct
  source 1..20: mol_type = other RNA
acccaggaggccaggcccca

SEQ ID NO: 9076 - RNA, 20 nt, synthetic construct
  source 1..20: mol_type = other RNA
acccaggggtccaggcccag

SEQ ID NO: 9077 - RNA, 20 nt, synthetic construct
  source 1..20: mol_type = other RNA
acccagtgtccacaaggcct

SEQ ID NO: 9078 - RNA, 20 nt, synthetic construct
  source 1..20: mol_type = other RNA
acccagttgtcatggcgata

SEQ ID NO: 9079 - RNA, 20 nt, synthetic construct
  source 1..20: mol_type = other RNA
accccaatgctccaggcctc

SEQ ID NO: 9080 - RNA, 20 nt, synthetic construct
  source 1..20: mol_type = other RNA
accccaattgccttagtggc

SEQ ID NO: 9081 - RNA, 20 nt, synthetic construct
  source 1..20: mol_type = other RNA
accccacacccagacctgac

SEQ ID NO: 9082 - RNA, 20 nt, synthetic construct
  source 1..20: mol_type = other RNA
accccacagttggaggagaa

SEQ ID NO: 9083 - RNA, 20 nt, synthetic construct
  source 1..20: mol_type = other RNA
accccacatggtacctgtta

SEQ ID NO: 9084 - RNA, 20 nt, synthetic construct
  source 1..20: mol_type = other RNA
accccacgagaggccacccc

SEQ ID NO: 9085 - RNA, 20 nt, synthetic construct
  source 1..20: mol_type = other RNA
accccacgtgggtttatcaa

SEQ ID NO: 9086 - RNA, 20 nt, synthetic construct
  source 1..20: mol_type = other RNA
accccagcagatactctgca

SEQ ID NO: 9087 - RNA, 20 nt, synthetic construct
  source 1..20: mol_type = other RNA
accccagcccaccccaatgc

SEQ ID NO: 9088 - RNA, 20 nt, synthetic construct
  source 1..20: mol_type = other RNA
accccagccctgtctaccag

SEQ ID NO: 9089 - RNA, 20 nt, synthetic construct
  source 1..20: mol_type = other RNA
accccccaagtccctcacct

SEQ ID NO: 9090 - RNA, 20 nt, synthetic construct
  source 1..20: mol_type = other RNA
acccccctcctcaccacagc

SEQ ID NO: 9091 - RNA, 20 nt, synthetic construct
  source 1..20: mol_type = other RNA
acccccgtcaccacccacag

SEQ ID NO: 9092 - RNA, 20 nt, synthetic construct
  source 1..20: mol_type = other RNA
accccctagccactaaggca

SEQ ID NO: 9093 - RNA, 20 nt, synthetic construct
  source 1..20: mol_type = other RNA
accccctggacttcggcttt

SEQ ID NO: 9094 - RNA, 20 nt, synthetic construct
  source 1..20: mol_type = other RNA
accccgaagagtgagtttgc

SEQ ID NO: 9095 - RNA, 20 nt, synthetic construct
  source 1..20: mol_type = other RNA
acccctaagggaagaatgag

SEQ ID NO: 9096 - RNA, 20 nt, synthetic construct
  source 1..20: mol_type = other RNA
acccctccccattcaaccca

SEQ ID NO: 9097 - RNA, 20 nt, synthetic construct
  source 1..20: mol_type = other RNA
acccctctgggagtcccgcc

SEQ ID NO: 9098 - RNA, 20 nt, synthetic construct
  source 1..20: mol_type = other RNA
acccctgggtctgaatgggg

SEQ ID NO: 9099 - RNA, 20 nt, synthetic construct
  source 1..20: mol_type = other RNA
acccctgtagggaaggggca

SEQ ID NO: 9100 - RNA, 20 nt, synthetic construct
  source 1..20: mol_type = other RNA
accctaagaacttgggaaca

SEQ ID NO: 9101 - RNA, 20 nt, synthetic construct
  source 1..20: mol_type = other RNA
accctcagtcctaggaaaac

SEQ ID NO: 9102 - RNA, 20 nt, synthetic construct
  source 1..20: mol_type = other RNA
accctctcccagaacctgag

SEQ ID NO: 9103 - RNA, 20 nt, synthetic construct
  source 1..20: mol_type = other RNA
accctgcatagccctgggcc

SEQ ID NO: 9104 - RNA, 20 nt, synthetic construct
  source 1..20: mol_type = other RNA
accctgcccccattcctgca

SEQ ID NO: 9105 - RNA, 20 nt, synthetic construct
  source 1..20: mol_type = other RNA
accctgcgctaccctctccc

SEQ ID NO: 9106 - RNA, 20 nt, synthetic construct
  source 1..20: mol_type = other RNA
accctgctctgggcggagga

SEQ ID NO: 9107 - RNA, 20 nt, synthetic construct
  source 1..20: mol_type = other RNA
accctgtgctgggacagact

SEQ ID NO: 9108 - RNA, 20 nt, synthetic construct
  source 1..20: mol_type = other RNA
acccttggaaggacctggct

SEQ ID NO: 9109 - RNA, 20 nt, synthetic construct
  source 1..20: mol_type = other RNA
accgtgtccctggatctgtt

SEQ ID NO: 9110 - RNA, 20 nt, synthetic construct
  source 1..20: mol_type = other RNA
accgtttctcattcttccct

SEQ ID NO: 9111 - RNA, 20 nt, synthetic construct
  source 1..20: mol_type = other RNA
acctacttggcctggacccc

SEQ ID NO: 9112 - RNA, 20 nt, synthetic construct
  source 1..20: mol_type = other RNA
acctaggacgcaccattctc

SEQ ID NO: 9113 - RNA, 20 nt, synthetic construct
  source 1..20: mol_type = other RNA
acctcatgctcttggccctc

SEQ ID NO: 9114 - RNA, 20 nt, synthetic construct
  source 1..20: mol_type = other RNA
acctctccaaagctgcccat

SEQ ID NO: 9115 - RNA, 20 nt, synthetic construct
  source 1..20: mol_type = other RNA
acctcttccctagtctgagc

SEQ ID NO: 9116 - RNA, 20 nt, synthetic construct
  source 1..20: mol_type = other RNA
acctgaactggagctgagga

SEQ ID NO: 9117 - RNA, 20 nt, synthetic construct
  source 1..20: mol_type = other RNA
acctgacccaaacccagctc

SEQ ID NO: 9118 - RNA, 20 nt, synthetic construct
  source 1..20: mol_type = other RNA
acctgagaagggaatccctc

SEQ ID NO: 9119 - RNA, 20 nt, synthetic construct
  source 1..20: mol_type = other RNA
acctgagctgctctgacgcg

SEQ ID NO: 9120 - RNA, 20 nt, synthetic construct
  source 1..20: mol_type = other RNA
acctgcccagtacaggcatc

SEQ ID NO: 9121 - RNA, 20 nt, synthetic construct
  source 1..20: mol_type = other RNA
acctgcccggttctcagtgg

SEQ ID NO: 9122 - RNA, 20 nt, synthetic construct
  source 1..20: mol_type = other RNA
acctgcctggagaaggatgc

SEQ ID NO: 9123 - RNA, 20 nt, synthetic construct
  source 1..20: mol_type = other RNA
acctggctgggtttaaggca

SEQ ID NO: 9124 - RNA, 20 nt, synthetic construct
  source 1..20: mol_type = other RNA
acctggggctgtgtttctcg

SEQ ID NO: 9125 - RNA, 20 nt, synthetic construct
  source 1..20: mol_type = other RNA
acctggtgaacacctaggac

SEQ ID NO: 9126 - RNA, 20 nt, synthetic construct
  source 1..20: mol_type = other RNA
acctgtgagataaggccagt

SEQ ID NO: 9127 - RNA, 20 nt, synthetic construct
  source 1..20: mol_type = other RNA
acctgtgggtggtgacgggg

SEQ ID NO: 9128 - RNA, 20 nt, synthetic construct
  source 1..20: mol_type = other RNA
acctgtgtgcctgggcccca

SEQ ID NO: 9129 - RNA, 20 nt, synthetic construct
  source 1..20: mol_type = other RNA
acctgttagacacggcaaaa

SEQ ID NO: 9130 - RNA, 20 nt, synthetic construct
  source 1..20: mol_type = other RNA
acctttctagtccccaattt

SEQ ID NO: 9131 - RNA, 20 nt, synthetic construct
  source 1..20: mol_type = other RNA
acgaaaacagatccagggac

SEQ ID NO: 9132 - RNA, 20 nt, synthetic construct
  source 1..20: mol_type = other RNA
acgaaaggactcctggctat

SEQ ID NO: 9133 - RNA, 20 nt, synthetic construct
  source 1..20: mol_type = other RNA
acgaagccgtgggcccaggg

SEQ ID NO: 9134 - RNA, 20 nt, synthetic construct
  source 1..20: mol_type = other RNA
acgacctggtgaacacctag

SEQ ID NO: 9135 - RNA, 20 nt, synthetic construct
  source 1..20: mol_type = other RNA
acgagaaacacagccccagg

SEQ ID NO: 9136 - RNA, 20 nt, synthetic construct
  source 1..20: mol_type = other RNA
acgagaggccaccccagccc

SEQ ID NO: 9137 - RNA, 20 nt, synthetic construct
  source 1..20: mol_type = other RNA
acgagccgagttcatcccgt

SEQ ID NO: 9138 - RNA, 20 nt, synthetic construct
  source 1..20: mol_type = other RNA
acgaggaagggggacaggga

SEQ ID NO: 9139 - RNA, 20 nt, synthetic construct
  source 1..20: mol_type = other RNA
acgagggccaagagcatgag

SEQ ID NO: 9140 - RNA, 20 nt, synthetic construct
  source 1..20: mol_type = other RNA
acgagtccaggccccagccc

SEQ ID NO: 9141 - RNA, 20 nt, synthetic construct
  source 1..20: mol_type = other RNA
acgcaccagacggccgcgtc

SEQ ID NO: 9142 - RNA, 20 nt, synthetic construct
  source 1..20: mol_type = other RNA
acgcaccattctcacaaagg

SEQ ID NO: 9143 - RNA, 20 nt, synthetic construct
  source 1..20: mol_type = other RNA
acgcacggaggaacaatata

SEQ ID NO: 9144 - RNA, 20 nt, synthetic construct
  source 1..20: mol_type = other RNA
acgcctggttgcccagtggt

SEQ ID NO: 9145 - RNA, 20 nt, synthetic construct
  source 1..20: mol_type = other RNA
acgcggccgtctggtgcgtt

SEQ ID NO: 9146 - RNA, 20 nt, synthetic construct
  source 1..20: mol_type = other RNA
acggacacccccctcctcac

SEQ ID NO: 9147 - RNA, 20 nt, synthetic construct
  source 1..20: mol_type = other RNA
acggaggaacaatataaatt

SEQ ID NO: 9148 - RNA, 20 nt, synthetic construct
  source 1..20: mol_type = other RNA
acggcaaaacccccgtcacc

SEQ ID NO: 9149 - RNA, 20 nt, synthetic construct
  source 1..20: mol_type = other RNA
acggccgcgtcagagcagct

SEQ ID NO: 9150 - RNA, 20 nt, synthetic construct
  source 1..20: mol_type = other RNA
acggcttcgttcctgcagag

SEQ ID NO: 9151 - RNA, 20 nt, synthetic construct
  source 1..20: mol_type = other RNA
acgggataaattacccccca

SEQ ID NO: 9152 - RNA, 20 nt, synthetic construct
  source 1..20: mol_type = other RNA
acgggatgaactcggctcgt

SEQ ID NO: 9153 - RNA, 20 nt, synthetic construct
  source 1..20: mol_type = other RNA
acgggccaccgtttctcatt

SEQ ID NO: 9154 - RNA, 20 nt, synthetic construct
  source 1..20: mol_type = other RNA
acggggaagggagggggctt

SEQ ID NO: 9155 - RNA, 20 nt, synthetic construct
  source 1..20: mol_type = other RNA
acggggatgcaggggaacgg

SEQ ID NO: 9156 - RNA, 20 nt, synthetic construct
  source 1..20: mol_type = other RNA
acggggccctgcagccaggg

SEQ ID NO: 9157 - RNA, 20 nt, synthetic construct
  source 1..20: mol_type = other RNA
acggggctcagtctgaagag

SEQ ID NO: 9158 - RNA, 20 nt, synthetic construct
  source 1..20: mol_type = other RNA
acggggctggctactggcct

SEQ ID NO: 9159 - RNA, 20 nt, synthetic construct
  source 1..20: mol_type = other RNA
acgggggttttgccgtgtct

SEQ ID NO: 9160 - RNA, 20 nt, synthetic construct
  source 1..20: mol_type = other RNA
acggtgctaggacagtgggg

SEQ ID NO: 9161 - RNA, 20 nt, synthetic construct
  source 1..20: mol_type = other RNA
acggtggcccgtgtcagccc

SEQ ID NO: 9162 - RNA, 20 nt, synthetic construct
  source 1..20: mol_type = other RNA
acggtgtcccagcaagtcgg

SEQ ID NO: 9163 - RNA, 20 nt, synthetic construct
  source 1..20: mol_type = other RNA
acgtaacctgagaagggaat

SEQ ID NO: 9164 - RNA, 20 nt, synthetic construct
  source 1..20: mol_type = other RNA
acgtgccctgggaacgggat

SEQ ID NO: 9165 - RNA, 20 nt, synthetic construct
  source 1..20: mol_type = other RNA
acgtgcggccccttcacagc

SEQ ID NO: 9166 - RNA, 20 nt, synthetic construct
  source 1..20: mol_type = other RNA
acgtggccaagaagcagggg

SEQ ID NO: 9167 - RNA, 20 nt, synthetic construct
  source 1..20: mol_type = other RNA
acgtggggtaccctaagaac

SEQ ID NO: 9168 - RNA, 20 nt, synthetic construct
  source 1..20: mol_type = other RNA
acgtgggtttatcaaccact

SEQ ID NO: 9169 - RNA, 20 nt, synthetic construct
  source 1..20: mol_type = other RNA
actaaggcaattggggtgca

SEQ ID NO: 9170 - RNA, 20 nt, synthetic construct
  source 1..20: mol_type = other RNA
actagaaaggtgaagagcca

SEQ ID NO: 9171 - RNA, 20 nt, synthetic construct
  source 1..20: mol_type = other RNA
actaggctgtcctgggcaaa

SEQ ID NO: 9172 - RNA, 20 nt, synthetic construct
  source 1..20: mol_type = other RNA
actagggaagaggttccagc

SEQ ID NO: 9173 - RNA, 20 nt, synthetic construct
  source 1..20: mol_type = other RNA
actcaaacccagaagcccag

SEQ ID NO: 9174 - RNA, 20 nt, synthetic construct
  source 1..20: mol_type = other RNA
actcactcttcggggtatcc

SEQ ID NO: 9175 - RNA, 20 nt, synthetic construct
  source 1..20: mol_type = other RNA
actcaggaccaacttattct

SEQ ID NO: 9176 - RNA, 20 nt, synthetic construct
  source 1..20: mol_type = other RNA
actcaggggcctgggcggga

SEQ ID NO: 9177 - RNA, 20 nt, synthetic construct
  source 1..20: mol_type = other RNA
actccagagggagccacgaa

SEQ ID NO: 9178 - RNA, 20 nt, synthetic construct
  source 1..20: mol_type = other RNA
actccagagtccaggcccaa

SEQ ID NO: 9179 - RNA, 20 nt, synthetic construct
  source 1..20: mol_type = other RNA
actccagttcactgaggccc

SEQ ID NO: 9180 - RNA, 20 nt, synthetic construct
  source 1..20: mol_type = other RNA
actcccagaggggtgagaca

SEQ ID NO: 9181 - RNA, 20 nt, synthetic construct
  source 1..20: mol_type = other RNA
actccctttctctttctcca

SEQ ID NO: 9182 - RNA, 20 nt, synthetic construct
  source 1..20: mol_type = other RNA
actccctttgtgagaatggt

SEQ ID NO: 9183 - RNA, 20 nt, synthetic construct
  source 1..20: mol_type = other RNA
actcctagatccacgggata

SEQ ID NO: 9184 - RNA, 20 nt, synthetic construct
  source 1..20: mol_type = other RNA
actcctggctatctgcaaac

SEQ ID NO: 9185 - RNA, 20 nt, synthetic construct
  source 1..20: mol_type = other RNA
actcctggctctgaaggagg

SEQ ID NO: 9186 - RNA, 20 nt, synthetic construct
  source 1..20: mol_type = other RNA
actcctgggtctgagggtgg

SEQ ID NO: 9187 - RNA, 20 nt, synthetic construct
  source 1..20: mol_type = other RNA
actccttcatctgagggcgg

SEQ ID NO: 9188 - RNA, 20 nt, synthetic construct
  source 1..20: mol_type = other RNA
actccttcctcagctccagt

SEQ ID NO: 9189 - RNA, 20 nt, synthetic construct
  source 1..20: mol_type = other RNA
actcggctcgtttatttcca

SEQ ID NO: 9190 - RNA, 20 nt, synthetic construct
  source 1..20: mol_type = other RNA
actcgggctgtgaaggggcc

SEQ ID NO: 9191 - RNA, 20 nt, synthetic construct
  source 1..20: mol_type = other RNA
actcgtgggtctgagggagg

SEQ ID NO: 9192 - RNA, 20 nt, synthetic construct
  source 1..20: mol_type = other RNA
actctagcccccaaccccct

SEQ ID NO: 9193 - RNA, 20 nt, synthetic construct
  source 1..20: mol_type = other RNA
actctgcaggaacgaagccg

SEQ ID NO: 9194 - RNA, 20 nt, synthetic construct
  source 1..20: mol_type = other RNA
actctggagtccctggtgcc

SEQ ID NO: 9195 - RNA, 20 nt, synthetic construct
  source 1..20: mol_type = other RNA
actcttcggggtatcccagg

SEQ ID NO: 9196 - RNA, 20 nt, synthetic construct
  source 1..20: mol_type = other RNA
actcttgattcccggccagt

SEQ ID NO: 9197 - RNA, 20 nt, synthetic construct
  source 1..20: mol_type = other RNA
actctttaaggaaagaagga

SEQ ID NO: 9198 - RNA, 20 nt, synthetic construct
  source 1..20: mol_type = other RNA
actgaaaccctcagtcctag

SEQ ID NO: 9199 - RNA, 20 nt, synthetic construct
  source 1..20: mol_type = other RNA
actgaaggcctggccggcct

SEQ ID NO: 9200 - RNA, 20 nt, synthetic construct
  source 1..20: mol_type = other RNA
actgacgcacggaggaacaa

SEQ ID NO: 9201 - RNA, 20 nt, synthetic construct
  source 1..20: mol_type = other RNA
actgagaaccgggcaggtca

SEQ ID NO: 9202 - RNA, 20 nt, synthetic construct
  source 1..20: mol_type = other RNA
actgagcactgaaggcctgg

SEQ ID NO: 9203 - RNA, 20 nt, synthetic construct
  source 1..20: mol_type = other RNA
actgagccccgttcccctgc

SEQ ID NO: 9204 - RNA, 20 nt, synthetic construct
  source 1..20: mol_type = other RNA
actgaggccccctctgcacg

SEQ ID NO: 9205 - RNA, 20 nt, synthetic construct
  source 1..20: mol_type = other RNA
actgagggtttcagtgctaa

SEQ ID NO: 9206 - RNA, 20 nt, synthetic construct
  source 1..20: mol_type = other RNA
actgatcctggtgctgcagc

SEQ ID NO: 9207 - RNA, 20 nt, synthetic construct
  source 1..20: mol_type = other RNA
actgcttctcctcttgggaa

SEQ ID NO: 9208 - RNA, 20 nt, synthetic construct
  source 1..20: mol_type = other RNA
actgcttggcaaactcactc

SEQ ID NO: 9209 - RNA, 20 nt, synthetic construct
  source 1..20: mol_type = other RNA
actggaagcgccacctgtgg

SEQ ID NO: 9210 - RNA, 20 nt, synthetic construct
  source 1..20: mol_type = other RNA
actggagctgaggaaggagt

SEQ ID NO: 9211 - RNA, 20 nt, synthetic construct
  source 1..20: mol_type = other RNA
actggagtgtgacagcctgg

SEQ ID NO: 9212 - RNA, 20 nt, synthetic construct
  source 1..20: mol_type = other RNA
actggccgggaatcaagagt

SEQ ID NO: 9213 - RNA, 20 nt, synthetic construct
  source 1..20: mol_type = other RNA
actggccttatctcacaggt

SEQ ID NO: 9214 - RNA, 20 nt, synthetic construct
  source 1..20: mol_type = other RNA
actggctgtttaagatacgc

SEQ ID NO: 9215 - RNA, 20 nt, synthetic construct
  source 1..20: mol_type = other RNA
actgggcaaccaggcgtatc

SEQ ID NO: 9216 - RNA, 20 nt, synthetic construct
  source 1..20: mol_type = other RNA
actgggcaggtccttgaaag

SEQ ID NO: 9217 - RNA, 20 nt, synthetic construct
  source 1..20: mol_type = other RNA
actggggactctttaaggaa

SEQ ID NO: 9218 - RNA, 20 nt, synthetic construct
  source 1..20: mol_type = other RNA
actgggggcctggactcctg

SEQ ID NO: 9219 - RNA, 20 nt, synthetic construct
  source 1..20: mol_type = other RNA
actgggtggaaataaacgag

SEQ ID NO: 9220 - RNA, 20 nt, synthetic construct
  source 1..20: mol_type = other RNA
actgggtgggctccgggacc

SEQ ID NO: 9221 - RNA, 20 nt, synthetic construct
  source 1..20: mol_type = other RNA
actgtcctagcaccgtgtcc

SEQ ID NO: 9222 - RNA, 20 nt, synthetic construct
  source 1..20: mol_type = other RNA
actgtctctgggtgactctt

SEQ ID NO: 9223 - RNA, 20 nt, synthetic construct
  source 1..20: mol_type = other RNA
actgtggggtgactgcttgg

SEQ ID NO: 9224 - RNA, 20 nt, synthetic construct
  source 1..20: mol_type = other RNA
acttattctgattttgtttt

SEQ ID NO: 9225 - RNA, 20 nt, synthetic construct
  source 1..20: mol_type = other RNA
acttcccaagaggagaagca

SEQ ID NO: 9226 - RNA, 20 nt, synthetic construct
  source 1..20: mol_type = other RNA
acttcctgtttgcagatagc

SEQ ID NO: 9227 - RNA, 20 nt, synthetic construct
  source 1..20: mol_type = other RNA
acttcggcttttgtcccccc

SEQ ID NO: 9228 - RNA, 20 nt, synthetic construct
  source 1..20: mol_type = other RNA
acttctgggtcttagggagg

SEQ ID NO: 9229 - RNA, 20 nt, synthetic construct
  source 1..20: mol_type = other RNA
acttgccccaggccttgtgg

SEQ ID NO: 9230 - RNA, 20 nt, synthetic construct
  source 1..20: mol_type = other RNA
acttggcctggaccccacga

SEQ ID NO: 9231 - RNA, 20 nt, synthetic construct
  source 1..20: mol_type = other RNA
acttgggaacagccacagca

SEQ ID NO: 9232 - RNA, 20 nt, synthetic construct
  source 1..20: mol_type = other RNA
acttggggggacaaaagccg

SEQ ID NO: 9233 - RNA, 20 nt, synthetic construct
  source 1..20: mol_type = other RNA
acttggggggtaatttatcc

SEQ ID NO: 9234 - RNA, 20 nt, synthetic construct
  source 1..20: mol_type = other RNA
acttggtgaggctggtaccc

SEQ ID NO: 9235 - RNA, 20 nt, synthetic construct
  source 1..20: mol_type = other RNA
actttggctcttcacctttc

SEQ ID NO: 9236 - RNA, 20 nt, synthetic construct
  source 1..20: mol_type = other RNA
agaaacacagccccaggtgg

SEQ ID NO: 9237 - RNA, 20 nt, synthetic construct
  source 1..20: mol_type = other RNA
agaaacggtggcccgtgtca

SEQ ID NO: 9238 - RNA, 20 nt, synthetic construct
  source 1..20: mol_type = other RNA
agaaactggccgggaatcaa

SEQ ID NO: 9239 - RNA, 20 nt, synthetic construct
  source 1..20: mol_type = other RNA
agaaagagaaagggagtaga

SEQ ID NO: 9240 - RNA, 20 nt, synthetic construct
  source 1..20: mol_type = other RNA
agaaagggagtagaggcggc

SEQ ID NO: 9241 - RNA, 20 nt, synthetic construct
  source 1..20: mol_type = other RNA
agaaaggtgaagagccaaag

SEQ ID NO: 9242 - RNA, 20 nt, synthetic construct
  source 1..20: mol_type = other RNA
agaacctgagctgctctgac

SEQ ID NO: 9243 - RNA, 20 nt, synthetic construct
  source 1..20: mol_type = other RNA
agaactcaggaccaacttat

SEQ ID NO: 9244 - RNA, 20 nt, synthetic construct
  source 1..20: mol_type = other RNA
agaacttgggaacagccaca

SEQ ID NO: 9245 - RNA, 20 nt, synthetic construct
  source 1..20: mol_type = other RNA
agaagagctgggggcctggg

SEQ ID NO: 9246 - RNA, 20 nt, synthetic construct
  source 1..20: mol_type = other RNA
agaagcaggggagctgggtt

SEQ ID NO: 9247 - RNA, 20 nt, synthetic construct
  source 1..20: mol_type = other RNA
agaagcagtttggaaaaaca

SEQ ID NO: 9248 - RNA, 20 nt, synthetic construct
  source 1..20: mol_type = other RNA
agaagcccagagcagggcct

SEQ ID NO: 9249 - RNA, 20 nt, synthetic construct
  source 1..20: mol_type = other RNA
agaagccccctcccttcccc

SEQ ID NO: 9250 - RNA, 20 nt, synthetic construct
  source 1..20: mol_type = other RNA
agaaggatgcaggacgagaa

SEQ ID NO: 9251 - RNA, 20 nt, synthetic construct
  source 1..20: mol_type = other RNA
agaaggatggagaaagagaa

SEQ ID NO: 9252 - RNA, 20 nt, synthetic construct
  source 1..20: mol_type = other RNA
agaagggaatccctcctctc

SEQ ID NO: 9253 - RNA, 20 nt, synthetic construct
  source 1..20: mol_type = other RNA
agaataagttggtcctgagt

SEQ ID NO: 9254 - RNA, 20 nt, synthetic construct
  source 1..20: mol_type = other RNA
agaatccacccaaaaggcag

SEQ ID NO: 9255 - RNA, 20 nt, synthetic construct
  source 1..20: mol_type = other RNA
agaatcctggctccagcccc

SEQ ID NO: 9256 - RNA, 20 nt, synthetic construct
  source 1..20: mol_type = other RNA
agaatgagaaacggtggccc

SEQ ID NO: 9257 - RNA, 20 nt, synthetic construct
  source 1..20: mol_type = other RNA
agaatggtgcgtcctaggtg

SEQ ID NO: 9258 - RNA, 20 nt, synthetic construct
  source 1..20: mol_type = other RNA
agacacggcaaaacccccgt

SEQ ID NO: 9259 - RNA, 20 nt, synthetic construct
  source 1..20: mol_type = other RNA
agacagctgcacacctgtgt

SEQ ID NO: 9260 - RNA, 20 nt, synthetic construct
  source 1..20: mol_type = other RNA
agacagggctggggtggcct

SEQ ID NO: 9261 - RNA, 20 nt, synthetic construct
  source 1..20: mol_type = other RNA
agacagtgaccaaccatccc

SEQ ID NO: 9262 - RNA, 20 nt, synthetic construct
  source 1..20: mol_type = other RNA
agacccacgagtccaggccc

SEQ ID NO: 9263 - RNA, 20 nt, synthetic construct
  source 1..20: mol_type = other RNA
agacccaggggtccaggccc

SEQ ID NO: 9264 - RNA, 20 nt, synthetic construct
  source 1..20: mol_type = other RNA
agacctgacccaaacccagc

SEQ ID NO: 9265 - RNA, 20 nt, synthetic construct
  source 1..20: mol_type = other RNA
agacggccgcgtcagagcag

SEQ ID NO: 9266 - RNA, 20 nt, synthetic construct
  source 1..20: mol_type = other RNA
agactagggaagaggttcca

SEQ ID NO: 9267 - RNA, 20 nt, synthetic construct
  source 1..20: mol_type = other RNA
agactcaggggcctgggcgg

SEQ ID NO: 9268 - RNA, 20 nt, synthetic construct
  source 1..20: mol_type = other RNA
agactgagccccgttcccct

SEQ ID NO: 9269 - RNA, 20 nt, synthetic construct
  source 1..20: mol_type = other RNA
agagaaagggagtagaggcg

SEQ ID NO: 9270 - RNA, 20 nt, synthetic construct
  source 1..20: mol_type = other RNA
agagaagagctgggggcctg

SEQ ID NO: 9271 - RNA, 20 nt, synthetic construct
  source 1..20: mol_type = other RNA
agagacagtgaccaaccatc

SEQ ID NO: 9272 - RNA, 20 nt, synthetic construct
  source 1..20: mol_type = other RNA
agagaggagggattcccttc

SEQ ID NO: 9273 - RNA, 20 nt, synthetic construct
  source 1..20: mol_type = other RNA
agagcaatgggcctttccct

SEQ ID NO: 9274 - RNA, 20 nt, synthetic construct
  source 1..20: mol_type = other RNA
agagcagagccaggaacccc

SEQ ID NO: 9275 - RNA, 20 nt, synthetic construct
  source 1..20: mol_type = other RNA
agagcagctcaggttctggg

SEQ ID NO: 9276 - RNA, 20 nt, synthetic construct
  source 1..20: mol_type = other RNA
agagcagggccttagggaag

SEQ ID NO: 9277 - RNA, 20 nt, synthetic construct
  source 1..20: mol_type = other RNA
agagcagggtcccgcttccc

SEQ ID NO: 9278 - RNA, 20 nt, synthetic construct
  source 1..20: mol_type = other RNA
agagcatgaggtcatggaaa

SEQ ID NO: 9279 - RNA, 20 nt, synthetic construct
  source 1..20: mol_type = other RNA
agagccaaagttagaactca

SEQ ID NO: 9280 - RNA, 20 nt, synthetic construct
  source 1..20: mol_type = other RNA
agagccaggaacccctgtag

SEQ ID NO: 9281 - RNA, 20 nt, synthetic construct
  source 1..20: mol_type = other RNA
agagccaggagtcctggccc

SEQ ID NO: 9282 - RNA, 20 nt, synthetic construct
  source 1..20: mol_type = other RNA
agagccaggggcatgagatg

SEQ ID NO: 9283 - RNA, 20 nt, synthetic construct
  source 1..20: mol_type = other RNA
agagctgggggcctgggctc

SEQ ID NO: 9284 - RNA, 20 nt, synthetic construct
  source 1..20: mol_type = other RNA
agaggagaagcagtttggaa

SEQ ID NO: 9285 - RNA, 20 nt, synthetic construct
  source 1..20: mol_type = other RNA
agaggagggattcccttctc

SEQ ID NO: 9286 - RNA, 20 nt, synthetic construct
  source 1..20: mol_type = other RNA
agaggccaccccagccctgt

SEQ ID NO: 9287 - RNA, 20 nt, synthetic construct
  source 1..20: mol_type = other RNA
agaggccccaggccacctac

SEQ ID NO: 9288 - RNA, 20 nt, synthetic construct
  source 1..20: mol_type = other RNA
agaggcgctcaggcttccct

SEQ ID NO: 9289 - RNA, 20 nt, synthetic construct
  source 1..20: mol_type = other RNA
agaggcggccacgacctggt

SEQ ID NO: 9290 - RNA, 20 nt, synthetic construct
  source 1..20: mol_type = other RNA
agaggctgggggcctggact

SEQ ID NO: 9291 - RNA, 20 nt, synthetic construct
  source 1..20: mol_type = other RNA
agaggctgttgggtcatttt

SEQ ID NO: 9292 - RNA, 20 nt, synthetic construct
  source 1..20: mol_type = other RNA
agagggagccacgaaaacag

SEQ ID NO: 9293 - RNA, 20 nt, synthetic construct
  source 1..20: mol_type = other RNA
agagggggcctcagtgaact

SEQ ID NO: 9294 - RNA, 20 nt, synthetic construct
  source 1..20: mol_type = other RNA
agaggggtgagacagctgca

SEQ ID NO: 9295 - RNA, 20 nt, synthetic construct
  source 1..20: mol_type = other RNA
agagggtagcgcagggtggc

SEQ ID NO: 9296 - RNA, 20 nt, synthetic construct
  source 1..20: mol_type = other RNA
agaggtgagggacttggggg

SEQ ID NO: 9297 - RNA, 20 nt, synthetic construct
  source 1..20: mol_type = other RNA
agaggttccagcccctcctc

SEQ ID NO: 9298 - RNA, 20 nt, synthetic construct
  source 1..20: mol_type = other RNA
agagtaggaggggctggagc

SEQ ID NO: 9299 - RNA, 20 nt, synthetic construct
  source 1..20: mol_type = other RNA
agagtatctgctggggtggt

SEQ ID NO: 9300 - RNA, 20 nt, synthetic construct
  source 1..20: mol_type = other RNA
agagtcacccagagacagtg

SEQ ID NO: 9301 - RNA, 20 nt, synthetic construct
  source 1..20: mol_type = other RNA
agagtccaggcccaacccct

SEQ ID NO: 9302 - RNA, 20 nt, synthetic construct
  source 1..20: mol_type = other RNA
agagtccccagtgctatctg

SEQ ID NO: 9303 - RNA, 20 nt, synthetic construct
  source 1..20: mol_type = other RNA
agagtgagtttgccaagcag

SEQ ID NO: 9304 - RNA, 20 nt, synthetic construct
  source 1..20: mol_type = other RNA
agataaggccagtagccagc

SEQ ID NO: 9305 - RNA, 20 nt, synthetic construct
  source 1..20: mol_type = other RNA
agatacgcctggttgcccag

SEQ ID NO: 9306 - RNA, 20 nt, synthetic construct
  source 1..20: mol_type = other RNA
agatactctgcaggaacgaa

SEQ ID NO: 9307 - RNA, 20 nt, synthetic construct
  source 1..20: mol_type = other RNA
agatagcactggggactctt

SEQ ID NO: 9308 - RNA, 20 nt, synthetic construct
  source 1..20: mol_type = other RNA
agatagccaggagtcctttc

SEQ ID NO: 9309 - RNA, 20 nt, synthetic construct
  source 1..20: mol_type = other RNA
agatccacgggataaattac

SEQ ID NO: 9310 - RNA, 20 nt, synthetic construct
  source 1..20: mol_type = other RNA
agatccagggacacggtgct

SEQ ID NO: 9311 - RNA, 20 nt, synthetic construct
  source 1..20: mol_type = other RNA
agatgaaggagtccaggccc

SEQ ID NO: 9312 - RNA, 20 nt, synthetic construct
  source 1..20: mol_type = other RNA
agatgagaagccccctccct

SEQ ID NO: 9313 - RNA, 20 nt, synthetic construct
  source 1..20: mol_type = other RNA
agatgcctgaggcctgggca

SEQ ID NO: 9314 - RNA, 20 nt, synthetic construct
  source 1..20: mol_type = other RNA
agatgggcagctttggagag

SEQ ID NO: 9315 - RNA, 20 nt, synthetic construct
  source 1..20: mol_type = other RNA
agatggtggacgaggaaggg

SEQ ID NO: 9316 - RNA, 20 nt, synthetic construct
  source 1..20: mol_type = other RNA
agcaagtcgggactccagag

SEQ ID NO: 9317 - RNA, 20 nt, synthetic construct
  source 1..20: mol_type = other RNA
agcaatgggcctttcccttt

SEQ ID NO: 9318 - RNA, 20 nt, synthetic construct
  source 1..20: mol_type = other RNA
agcacagggtggccttcctc

SEQ ID NO: 9319 - RNA, 20 nt, synthetic construct
  source 1..20: mol_type = other RNA
agcaccaggatcagtgaaac

SEQ ID NO: 9320 - RNA, 20 nt, synthetic construct
  source 1..20: mol_type = other RNA
agcaccgtgtccctggatct

SEQ ID NO: 9321 - RNA, 20 nt, synthetic construct
  source 1..20: mol_type = other RNA
agcactgaaaccctcagtcc

SEQ ID NO: 9322 - RNA, 20 nt, synthetic construct
  source 1..20: mol_type = other RNA
agcactgaaggcctggccgg

SEQ ID NO: 9323 - RNA, 20 nt, synthetic construct
  source 1..20: mol_type = other RNA
agcactggaagcgccacctg

SEQ ID NO: 9324 - RNA, 20 nt, synthetic construct
  source 1..20: mol_type = other RNA
agcactggggactctttaag

SEQ ID NO: 9325 - RNA, 20 nt, synthetic construct
  source 1..20: mol_type = other RNA
agcagagccaggaacccctg

SEQ ID NO: 9326 - RNA, 20 nt, synthetic construct
  source 1..20: mol_type = other RNA
agcagatactctgcaggaac

SEQ ID NO: 9327 - RNA, 20 nt, synthetic construct
  source 1..20: mol_type = other RNA
agcagctcaggttctgggag

SEQ ID NO: 9328 - RNA, 20 nt, synthetic construct
  source 1..20: mol_type = other RNA
agcagggccttagggaagcg

SEQ ID NO: 9329 - RNA, 20 nt, synthetic construct
  source 1..20: mol_type = other RNA
agcaggggagctgggtttgg

SEQ ID NO: 9330 - RNA, 20 nt, synthetic construct
  source 1..20: mol_type = other RNA
agcaggggggcgatgcttgg

SEQ ID NO: 9331 - RNA, 20 nt, synthetic construct
  source 1..20: mol_type = other RNA
agcagggtcccgcttcccta

SEQ ID NO: 9332 - RNA, 20 nt, synthetic construct
  source 1..20: mol_type = other RNA
agcagtcaccccacagttgg

SEQ ID NO: 9333 - RNA, 20 nt, synthetic construct
  source 1..20: mol_type = other RNA
agcagtttggaaaaacaaaa

SEQ ID NO: 9334 - RNA, 20 nt, synthetic construct
  source 1..20: mol_type = other RNA
agcataagctggtcacccca

SEQ ID NO: 9335 - RNA, 20 nt, synthetic construct
  source 1..20: mol_type = other RNA
agcatcgcccccctgctgtg

SEQ ID NO: 9336 - RNA, 20 nt, synthetic construct
  source 1..20: mol_type = other RNA
agcatgaggtcatggaaact

SEQ ID NO: 9337 - RNA, 20 nt, synthetic construct
  source 1..20: mol_type = other RNA
agcattggggtgggctgggg

SEQ ID NO: 9338 - RNA, 20 nt, synthetic construct
  source 1..20: mol_type = other RNA
agccaaagttagaactcagg

SEQ ID NO: 9339 - RNA, 20 nt, synthetic construct
  source 1..20: mol_type = other RNA
agccacagcaggggggcgat

SEQ ID NO: 9340 - RNA, 20 nt, synthetic construct
  source 1..20: mol_type = other RNA
agccacgaaaacagatccag

SEQ ID NO: 9341 - RNA, 20 nt, synthetic construct
  source 1..20: mol_type = other RNA
agccacggtgtcccagcaag

SEQ ID NO: 9342 - RNA, 20 nt, synthetic construct
  source 1..20: mol_type = other RNA
agccactaaggcaattgggg

SEQ ID NO: 9343 - RNA, 20 nt, synthetic construct
  source 1..20: mol_type = other RNA
agccagccccgtcctggcag

SEQ ID NO: 9344 - RNA, 20 nt, synthetic construct
  source 1..20: mol_type = other RNA
agccaggaacccctgtaggg

SEQ ID NO: 9345 - RNA, 20 nt, synthetic construct
  source 1..20: mol_type = other RNA
agccaggagtcctggccccc

SEQ ID NO: 9346 - RNA, 20 nt, synthetic construct
  source 1..20: mol_type = other RNA
agccaggagtcctttcgtgg

SEQ ID NO: 9347 - RNA, 20 nt, synthetic construct
  source 1..20: mol_type = other RNA
agccaggattcttagggctg

SEQ ID NO: 9348 - RNA, 20 nt, synthetic construct
  source 1..20: mol_type = other RNA
agccaggggcatgagatggt

SEQ ID NO: 9349 - RNA, 20 nt, synthetic construct
  source 1..20: mol_type = other RNA
agccaggggctgacacgggc

SEQ ID NO: 9350 - RNA, 20 nt, synthetic construct
  source 1..20: mol_type = other RNA
agccaggtccttccaagggt

SEQ ID NO: 9351 - RNA, 20 nt, synthetic construct
  source 1..20: mol_type = other RNA
agccagtggccagaggctgt

SEQ ID NO: 9352 - RNA, 20 nt, synthetic construct
  source 1..20: mol_type = other RNA
agcccacccagtgtccacaa

SEQ ID NO: 9353 - RNA, 20 nt, synthetic construct
  source 1..20: mol_type = other RNA
agcccaccccaatgctccag

SEQ ID NO: 9354 - RNA, 20 nt, synthetic construct
  source 1..20: mol_type = other RNA
agcccagagcagggccttag

SEQ ID NO: 9355 - RNA, 20 nt, synthetic construct
  source 1..20: mol_type = other RNA
agcccaggagaggcgctcag

SEQ ID NO: 9356 - RNA, 20 nt, synthetic construct
  source 1..20: mol_type = other RNA
agcccaggcccccagctctt

SEQ ID NO: 9357 - RNA, 20 nt, synthetic construct
  source 1..20: mol_type = other RNA
agccccaggtggagaaactg

SEQ ID NO: 9358 - RNA, 20 nt, synthetic construct
  source 1..20: mol_type = other RNA
agcccccaaccccctagcca

SEQ ID NO: 9359 - RNA, 20 nt, synthetic construct
  source 1..20: mol_type = other RNA
agccccctcccttccccgtt

SEQ ID NO: 9360 - RNA, 20 nt, synthetic construct
  source 1..20: mol_type = other RNA
agccccgcctccctaagacc

SEQ ID NO: 9361 - RNA, 20 nt, synthetic construct
  source 1..20: mol_type = other RNA
agccccgtcctggcagggct

SEQ ID NO: 9362 - RNA, 20 nt, synthetic construct
  source 1..20: mol_type = other RNA
agccccgttcccctgcatcc

SEQ ID NO: 9363 - RNA, 20 nt, synthetic construct
  source 1..20: mol_type = other RNA
agcccctcctactctagccc

SEQ ID NO: 9364 - RNA, 20 nt, synthetic construct
  source 1..20: mol_type = other RNA
agcccctcctccctcagacc

SEQ ID NO: 9365 - RNA, 20 nt, synthetic construct
  source 1..20: mol_type = other RNA
agcccctcctccttcagagc

SEQ ID NO: 9366 - RNA, 20 nt, synthetic construct
  source 1..20: mol_type = other RNA
agcccctcctctctcaaacc

SEQ ID NO: 9367 - RNA, 20 nt, synthetic construct
  source 1..20: mol_type = other RNA
agcccctcctgccttaaacc

SEQ ID NO: 9368 - RNA, 20 nt, synthetic construct
  source 1..20: mol_type = other RNA
agcccctggctgcagggccc

SEQ ID NO: 9369 - RNA, 20 nt, synthetic construct
  source 1..20: mol_type = other RNA
agcccgagtttccatgacct

SEQ ID NO: 9370 - RNA, 20 nt, synthetic construct
  source 1..20: mol_type = other RNA
agccctaagaatcctggctc

SEQ ID NO: 9371 - RNA, 20 nt, synthetic construct
  source 1..20: mol_type = other RNA
agccctgccaggacggggct

SEQ ID NO: 9372 - RNA, 20 nt, synthetic construct
  source 1..20: mol_type = other RNA
agccctgggcccacggcttc

SEQ ID NO: 9373 - RNA, 20 nt, synthetic construct
  source 1..20: mol_type = other RNA
agccctgtctaccaggctgc

SEQ ID NO: 9374 - RNA, 20 nt, synthetic construct
  source 1..20: mol_type = other RNA
agcccttccgccctcagatg

SEQ ID NO: 9375 - RNA, 20 nt, synthetic construct
  source 1..20: mol_type = other RNA
agccgaagtccagggggtcg

SEQ ID NO: 9376 - RNA, 20 nt, synthetic construct
  source 1..20: mol_type = other RNA
agccgagttcatcccgttcc

SEQ ID NO: 9377 - RNA, 20 nt, synthetic construct
  source 1..20: mol_type = other RNA
agccgtgggcccagggctat

SEQ ID NO: 9378 - RNA, 20 nt, synthetic construct
  source 1..20: mol_type = other RNA
agcctagttttagcactgaa

SEQ ID NO: 9379 - RNA, 20 nt, synthetic construct
  source 1..20: mol_type = other RNA
agcctcaccaagtggttgat

SEQ ID NO: 9380 - RNA, 20 nt, synthetic construct
  source 1..20: mol_type = other RNA
agcctctccccattcagacc

SEQ ID NO: 9381 - RNA, 20 nt, synthetic construct
  source 1..20: mol_type = other RNA
agcctctggccactggctgt

SEQ ID NO: 9382 - RNA, 20 nt, synthetic construct
  source 1..20: mol_type = other RNA
agcctgagcgcctctcctgg

SEQ ID NO: 9383 - RNA, 20 nt, synthetic construct
  source 1..20: mol_type = other RNA
agcctggggcccaggcacac

SEQ ID NO: 9384 - RNA, 20 nt, synthetic construct
  source 1..20: mol_type = other RNA
agcctggtagacagggctgg

SEQ ID NO: 9385 - RNA, 20 nt, synthetic construct
  source 1..20: mol_type = other RNA
agcgcagggtggccactgag

SEQ ID NO: 9386 - RNA, 20 nt, synthetic construct
  source 1..20: mol_type = other RNA
agcgccacctgtgggtggtg

SEQ ID NO: 9387 - RNA, 20 nt, synthetic construct
  source 1..20: mol_type = other RNA
agcgcctctcctgggcttgc

SEQ ID NO: 9388 - RNA, 20 nt, synthetic construct
  source 1..20: mol_type = other RNA
agcgggaccctgctctgggc

SEQ ID NO: 9389 - RNA, 20 nt, synthetic construct
  source 1..20: mol_type = other RNA
agctaaactcctagatccac

SEQ ID NO: 9390 - RNA, 20 nt, synthetic construct
  source 1..20: mol_type = other RNA
agctacgagggccaagagca

SEQ ID NO: 9391 - RNA, 20 nt, synthetic construct
  source 1..20: mol_type = other RNA
agctcaggttctgggagagg

SEQ ID NO: 9392 - RNA, 20 nt, synthetic construct
  source 1..20: mol_type = other RNA
agctccagttcaggtcccgg

SEQ ID NO: 9393 - RNA, 20 nt, synthetic construct
  source 1..20: mol_type = other RNA
agctcccctgcttcttggcc

SEQ ID NO: 9394 - RNA, 20 nt, synthetic construct
  source 1..20: mol_type = other RNA
agctccctcccgcctcctcc

SEQ ID NO: 9395 - RNA, 20 nt, synthetic construct
  source 1..20: mol_type = other RNA
agctcggaaaccaccccagc

SEQ ID NO: 9396 - RNA, 20 nt, synthetic construct
  source 1..20: mol_type = other RNA
agctcttctctgttcagccc

SEQ ID NO: 9397 - RNA, 20 nt, synthetic construct
  source 1..20: mol_type = other RNA
agctgaggaaggagtgaagc

SEQ ID NO: 9398 - RNA, 20 nt, synthetic construct
  source 1..20: mol_type = other RNA
agctgcacacctgtgtgcct

SEQ ID NO: 9399 - RNA, 20 nt, synthetic construct
  source 1..20: mol_type = other RNA
agctgcagcaccaggatcag

SEQ ID NO: 9400 - RNA, 20 nt, synthetic construct
  source 1..20: mol_type = other RNA
agctgcccatctggaggagg

SEQ ID NO: 9401 - RNA, 20 nt, synthetic construct
  source 1..20: mol_type = other RNA
agctgctctgacgcggccgt

SEQ ID NO: 9402 - RNA, 20 nt, synthetic construct
  source 1..20: mol_type = other RNA
agctgggggcctgggctcct

SEQ ID NO: 9403 - RNA, 20 nt, synthetic construct
  source 1..20: mol_type = other RNA
agctgggtttgggtcaggtc

SEQ ID NO: 9404 - RNA, 20 nt, synthetic construct
  source 1..20: mol_type = other RNA
agctggtcaccccacaccca

SEQ ID NO: 9405 - RNA, 20 nt, synthetic construct
  source 1..20: mol_type = other RNA
agctgtctcacccctctggg

SEQ ID NO: 9406 - RNA, 20 nt, synthetic construct
  source 1..20: mol_type = other RNA
agcttatgctgtttgcccag

SEQ ID NO: 9407 - RNA, 20 nt, synthetic construct
  source 1..20: mol_type = other RNA
agcttcactccttcctcagc

SEQ ID NO: 9408 - RNA, 20 nt, synthetic construct
  source 1..20: mol_type = other RNA
agcttccttacacttcccaa

SEQ ID NO: 9409 - RNA, 20 nt, synthetic construct
  source 1..20: mol_type = other RNA
agcttgacccttggaaggac

SEQ ID NO: 9410 - RNA, 20 nt, synthetic construct
  source 1..20: mol_type = other RNA
agctttggagaggtgaggga

SEQ ID NO: 9411 - RNA, 20 nt, synthetic construct
  source 1..20: mol_type = other RNA
aggaaaacagggatggttgg

SEQ ID NO: 9412 - RNA, 20 nt, synthetic construct
  source 1..20: mol_type = other RNA
aggaaagaaggatggagaaa

SEQ ID NO: 9413 - RNA, 20 nt, synthetic construct
  source 1..20: mol_type = other RNA
aggaacaatataaattgggg

SEQ ID NO: 9414 - RNA, 20 nt, synthetic construct
  source 1..20: mol_type = other RNA
aggaacccctgtagggaagg

SEQ ID NO: 9415 - RNA, 20 nt, synthetic construct
  source 1..20: mol_type = other RNA
aggaacgaagccgtgggccc

SEQ ID NO: 9416 - RNA, 20 nt, synthetic construct
  source 1..20: mol_type = other RNA
aggaagctgcagcaccagga

SEQ ID NO: 9417 - RNA, 20 nt, synthetic construct
  source 1..20: mol_type = other RNA
aggaaggagtgaagctaaac

SEQ ID NO: 9418 - RNA, 20 nt, synthetic construct
  source 1..20: mol_type = other RNA
aggaaggccaccctgtgctg

SEQ ID NO: 9419 - RNA, 20 nt, synthetic construct
  source 1..20: mol_type = other RNA
aggaagggggacagggaagc

SEQ ID NO: 9420 - RNA, 20 nt, synthetic construct
  source 1..20: mol_type = other RNA
aggaagtgaacggggaaggg

SEQ ID NO: 9421 - RNA, 20 nt, synthetic construct
  source 1..20: mol_type = other RNA
aggaatatgtcccagatagc

SEQ ID NO: 9422 - RNA, 20 nt, synthetic construct
  source 1..20: mol_type = other RNA
aggaatgggggcagggtacc

SEQ ID NO: 9423 - RNA, 20 nt, synthetic construct
  source 1..20: mol_type = other RNA
aggacagcctagttttagca

SEQ ID NO: 9424 - RNA, 20 nt, synthetic construct
  source 1..20: mol_type = other RNA
aggacagtggggaaaatgac

SEQ ID NO: 9425 - RNA, 20 nt, synthetic construct
  source 1..20: mol_type = other RNA
aggaccaacttattctgatt

SEQ ID NO: 9426 - RNA, 20 nt, synthetic construct
  source 1..20: mol_type = other RNA
aggacctgcccagtacaggc

SEQ ID NO: 9427 - RNA, 20 nt, synthetic construct
  source 1..20: mol_type = other RNA
aggacctggctgggtttaag

SEQ ID NO: 9428 - RNA, 20 nt, synthetic construct
  source 1..20: mol_type = other RNA
aggacgagaaacacagcccc

SEQ ID NO: 9429 - RNA, 20 nt, synthetic construct
  source 1..20: mol_type = other RNA
aggacgcaccattctcacaa

SEQ ID NO: 9430 - RNA, 20 nt, synthetic construct
  source 1..20: mol_type = other RNA
aggacggggctggctactgg

SEQ ID NO: 9431 - RNA, 20 nt, synthetic construct
  source 1..20: mol_type = other RNA
aggactcaaacccagaagcc

SEQ ID NO: 9432 - RNA, 20 nt, synthetic construct
  source 1..20: mol_type = other RNA
aggactcctggctatctgca

SEQ ID NO: 9433 - RNA, 20 nt, synthetic construct
  source 1..20: mol_type = other RNA
aggactcctggctctgaagg

SEQ ID NO: 9434 - RNA, 20 nt, synthetic construct
  source 1..20: mol_type = other RNA
aggactgagggtttcagtgc

SEQ ID NO: 9435 - RNA, 20 nt, synthetic construct
  source 1..20: mol_type = other RNA
aggagaagcagtttggaaaa

SEQ ID NO: 9436 - RNA, 20 nt, synthetic construct
  source 1..20: mol_type = other RNA
aggagaatccacccaaaagg

SEQ ID NO: 9437 - RNA, 20 nt, synthetic construct
  source 1..20: mol_type = other RNA
aggagagcaatgggcctttc

SEQ ID NO: 9438 - RNA, 20 nt, synthetic construct
  source 1..20: mol_type = other RNA
aggagagccaggggcatgag

SEQ ID NO: 9439 - RNA, 20 nt, synthetic construct
  source 1..20: mol_type = other RNA
aggagaggcgctcaggcttc

SEQ ID NO: 9440 - RNA, 20 nt, synthetic construct
  source 1..20: mol_type = other RNA
aggagcccaggcccccagct

SEQ ID NO: 9441 - RNA, 20 nt, synthetic construct
  source 1..20: mol_type = other RNA
aggaggaggggctggaacct

SEQ ID NO: 9442 - RNA, 20 nt, synthetic construct
  source 1..20: mol_type = other RNA
aggaggccaggccccagccc

SEQ ID NO: 9443 - RNA, 20 nt, synthetic construct
  source 1..20: mol_type = other RNA
aggaggcctggagcattggg

SEQ ID NO: 9444 - RNA, 20 nt, synthetic construct
  source 1..20: mol_type = other RNA
aggaggcgggagggagctac

SEQ ID NO: 9445 - RNA, 20 nt, synthetic construct
  source 1..20: mol_type = other RNA
aggagggacttgccccaggc

SEQ ID NO: 9446 - RNA, 20 nt, synthetic construct
  source 1..20: mol_type = other RNA
aggagggattcccttctcag

SEQ ID NO: 9447 - RNA, 20 nt, synthetic construct
  source 1..20: mol_type = other RNA
aggaggggctggaacctctt

SEQ ID NO: 9448 - RNA, 20 nt, synthetic construct
  source 1..20: mol_type = other RNA
aggaggggctggagccagga

SEQ ID NO: 9449 - RNA, 20 nt, synthetic construct
  source 1..20: mol_type = other RNA
aggaggggctggggcctgga

SEQ ID NO: 9450 - RNA, 20 nt, synthetic construct
  source 1..20: mol_type = other RNA
aggaggggctgggggccagg

SEQ ID NO: 9451 - RNA, 20 nt, synthetic construct
  source 1..20: mol_type = other RNA
aggaggggggtgtccgtgtg

SEQ ID NO: 9452 - RNA, 20 nt, synthetic construct
  source 1..20: mol_type = other RNA
aggagtccaggcccccagcc

SEQ ID NO: 9453 - RNA, 20 nt, synthetic construct
  source 1..20: mol_type = other RNA
aggagtccaggcccccagtc

SEQ ID NO: 9454 - RNA, 20 nt, synthetic construct
  source 1..20: mol_type = other RNA
aggagtcctggcccccagcc

SEQ ID NO: 9455 - RNA, 20 nt, synthetic construct
  source 1..20: mol_type = other RNA
aggagtcctttcgtggtttc

SEQ ID NO: 9456 - RNA, 20 nt, synthetic construct
  source 1..20: mol_type = other RNA
aggagtgaagctaaactcct

SEQ ID NO: 9457 - RNA, 20 nt, synthetic construct
  source 1..20: mol_type = other RNA
aggagtttagcttcactcct

SEQ ID NO: 9458 - RNA, 20 nt, synthetic construct
  source 1..20: mol_type = other RNA
aggatcagtgaaacgcacca

SEQ ID NO: 9459 - RNA, 20 nt, synthetic construct
  source 1..20: mol_type = other RNA
aggatgcaggacgagaaaca

SEQ ID NO: 9460 - RNA, 20 nt, synthetic construct
  source 1..20: mol_type = other RNA
aggatggagaaagagaaagg

SEQ ID NO: 9461 - RNA, 20 nt, synthetic construct
  source 1..20: mol_type = other RNA
aggattcttagggctgaaca

SEQ ID NO: 9462 - RNA, 20 nt, synthetic construct
  source 1..20: mol_type = other RNA
aggcaattggggtgcaggaa

SEQ ID NO: 9463 - RNA, 20 nt, synthetic construct
  source 1..20: mol_type = other RNA
aggcacacaggtgtgcagct

SEQ ID NO: 9464 - RNA, 20 nt, synthetic construct
  source 1..20: mol_type = other RNA
aggcagcctggtagacaggg

SEQ ID NO: 9465 - RNA, 20 nt, synthetic construct
  source 1..20: mol_type = other RNA
aggcaggaggggctgggggc

SEQ ID NO: 9466 - RNA, 20 nt, synthetic construct
  source 1..20: mol_type = other RNA
aggcaggtccccaagcatcg

SEQ ID NO: 9467 - RNA, 20 nt, synthetic construct
  source 1..20: mol_type = other RNA
aggcatccctgtgaaagatg

SEQ ID NO: 9468 - RNA, 20 nt, synthetic construct
  source 1..20: mol_type = other RNA
aggcatctttcacagggatg

SEQ ID NO: 9469 - RNA, 20 nt, synthetic construct
  source 1..20: mol_type = other RNA
aggccaagtaggtggcctgg

SEQ ID NO: 9470 - RNA, 20 nt, synthetic construct
  source 1..20: mol_type = other RNA
aggccaccccagccctgtct

SEQ ID NO: 9471 - RNA, 20 nt, synthetic construct
  source 1..20: mol_type = other RNA
aggccaccctgtgctgggac

SEQ ID NO: 9472 - RNA, 20 nt, synthetic construct
  source 1..20: mol_type = other RNA
aggccacctacttggcctgg

SEQ ID NO: 9473 - RNA, 20 nt, synthetic construct
  source 1..20: mol_type = other RNA
aggccaggccccagcccttc

SEQ ID NO: 9474 - RNA, 20 nt, synthetic construct
  source 1..20: mol_type = other RNA
aggccagtagccagccccgt

SEQ ID NO: 9475 - RNA, 20 nt, synthetic construct
  source 1..20: mol_type = other RNA
aggcccaacccctccccatt

SEQ ID NO: 9476 - RNA, 20 nt, synthetic construct
  source 1..20: mol_type = other RNA
aggcccagccccgcctccct

SEQ ID NO: 9477 - RNA, 20 nt, synthetic construct
  source 1..20: mol_type = other RNA
aggcccattgctctccttgc

SEQ ID NO: 9478 - RNA, 20 nt, synthetic construct
  source 1..20: mol_type = other RNA
aggccccagcccctcctctc

SEQ ID NO: 9479 - RNA, 20 nt, synthetic construct
  source 1..20: mol_type = other RNA
aggccccagcccttccgccc

SEQ ID NO: 9480 - RNA, 20 nt, synthetic construct
  source 1..20: mol_type = other RNA
aggccccaggccacctactt

SEQ ID NO: 9481 - RNA, 20 nt, synthetic construct
  source 1..20: mol_type = other RNA
aggcccccagcctctcccca

SEQ ID NO: 9482 - RNA, 20 nt, synthetic construct
  source 1..20: mol_type = other RNA
aggcccccagctcttctctg

SEQ ID NO: 9483 - RNA, 20 nt, synthetic construct
  source 1..20: mol_type = other RNA
aggcccccagtccctccacc

SEQ ID NO: 9484 - RNA, 20 nt, synthetic construct
  source 1..20: mol_type = other RNA
aggccccctctgcacggggc

SEQ ID NO: 9485 - RNA, 20 nt, synthetic construct
  source 1..20: mol_type = other RNA
aggcccctgagtctgtccca

SEQ ID NO: 9486 - RNA, 20 nt, synthetic construct
  source 1..20: mol_type = other RNA
aggccctgctctgggcttct

SEQ ID NO: 9487 - RNA, 20 nt, synthetic construct
  source 1..20: mol_type = other RNA
aggccggccaggccttcagt

SEQ ID NO: 9488 - RNA, 20 nt, synthetic construct
  source 1..20: mol_type = other RNA
aggcctcaggcatctttcac

SEQ ID NO: 9489 - RNA, 20 nt, synthetic construct
  source 1..20: mol_type = other RNA
aggcctcctgggataccccg

SEQ ID NO: 9490 - RNA, 20 nt, synthetic construct
  source 1..20: mol_type = other RNA
aggcctggagcattggggtg

SEQ ID NO: 9491 - RNA, 20 nt, synthetic construct
  source 1..20: mol_type = other RNA
aggcctggccggcctgacca

SEQ ID NO: 9492 - RNA, 20 nt, synthetic construct
  source 1..20: mol_type = other RNA
aggcctgggcaccagggact

SEQ ID NO: 9493 - RNA, 20 nt, synthetic construct
  source 1..20: mol_type = other RNA
aggcctggggcaagtccctc

SEQ ID NO: 9494 - RNA, 20 nt, synthetic construct
  source 1..20: mol_type = other RNA
aggccttcagtgctcagtgg

SEQ ID NO: 9495 - RNA, 20 nt, synthetic construct
  source 1..20: mol_type = other RNA
aggccttgtggacactgggt

SEQ ID NO: 9496 - RNA, 20 nt, synthetic construct
  source 1..20: mol_type = other RNA
aggcgctcaggcttccctgt

SEQ ID NO: 9497 - RNA, 20 nt, synthetic construct
  source 1..20: mol_type = other RNA
aggcggccacgacctggtga

SEQ ID NO: 9498 - RNA, 20 nt, synthetic construct
  source 1..20: mol_type = other RNA
aggcgggagggagctacgag

SEQ ID NO: 9499 - RNA, 20 nt, synthetic construct
  source 1..20: mol_type = other RNA
aggcggggctgggcctggac

SEQ ID NO: 9500 - RNA, 20 nt, synthetic construct
  source 1..20: mol_type = other RNA
aggcgtatcttaaacagcca

SEQ ID NO: 9501 - RNA, 20 nt, synthetic construct
  source 1..20: mol_type = other RNA
aggctgccttttgggtggat

SEQ ID NO: 9502 - RNA, 20 nt, synthetic construct
  source 1..20: mol_type = other RNA
aggctgggggcctggactcc

SEQ ID NO: 9503 - RNA, 20 nt, synthetic construct
  source 1..20: mol_type = other RNA
aggctggtaccctgccccca

SEQ ID NO: 9504 - RNA, 20 nt, synthetic construct
  source 1..20: mol_type = other RNA
aggctgtcacactccagttc

SEQ ID NO: 9505 - RNA, 20 nt, synthetic construct
  source 1..20: mol_type = other RNA
aggctgtcctgggcaaacag

SEQ ID NO: 9506 - RNA, 20 nt, synthetic construct
  source 1..20: mol_type = other RNA
aggctgttgggtcattttcc

SEQ ID NO: 9507 - RNA, 20 nt, synthetic construct
  source 1..20: mol_type = other RNA
aggcttccctgtcccccttc

SEQ ID NO: 9508 - RNA, 20 nt, synthetic construct
  source 1..20: mol_type = other RNA
agggaaaggcccattgctct

SEQ ID NO: 9509 - RNA, 20 nt, synthetic construct
  source 1..20: mol_type = other RNA
agggaagaatgagaaacggt

SEQ ID NO: 9510 - RNA, 20 nt, synthetic construct
  source 1..20: mol_type = other RNA
agggaagaggttccagcccc

SEQ ID NO: 9511 - RNA, 20 nt, synthetic construct
  source 1..20: mol_type = other RNA
agggaagcctgagcgcctct

SEQ ID NO: 9512 - RNA, 20 nt, synthetic construct
  source 1..20: mol_type = other RNA
agggaagcgggaccctgctc

SEQ ID NO: 9513 - RNA, 20 nt, synthetic construct
  source 1..20: mol_type = other RNA
agggaaggggcaggagagcc

SEQ ID NO: 9514 - RNA, 20 nt, synthetic construct
  source 1..20: mol_type = other RNA
agggaatccctcctctctga

SEQ ID NO: 9515 - RNA, 20 nt, synthetic construct
  source 1..20: mol_type = other RNA
agggacacggtgctaggaca

SEQ ID NO: 9516 - RNA, 20 nt, synthetic construct
  source 1..20: mol_type = other RNA
agggactccagagtccaggc

SEQ ID NO: 9517 - RNA, 20 nt, synthetic construct
  source 1..20: mol_type = other RNA
agggacttgccccaggcctt

SEQ ID NO: 9518 - RNA, 20 nt, synthetic construct
  source 1..20: mol_type = other RNA
agggacttggggggtaattt

SEQ ID NO: 9519 - RNA, 20 nt, synthetic construct
  source 1..20: mol_type = other RNA
agggagccacgaaaacagat

SEQ ID NO: 9520 - RNA, 20 nt, synthetic construct
  source 1..20: mol_type = other RNA
agggagctacgagggccaag

SEQ ID NO: 9521 - RNA, 20 nt, synthetic construct
  source 1..20: mol_type = other RNA
agggaggaggggctggggcc

SEQ ID NO: 9522 - RNA, 20 nt, synthetic construct
  source 1..20: mol_type = other RNA
agggaggcggggctgggcct

SEQ ID NO: 9523 - RNA, 20 nt, synthetic construct
  source 1..20: mol_type = other RNA
agggagggggcttctcatct

SEQ ID NO: 9524 - RNA, 20 nt, synthetic construct
  source 1..20: mol_type = other RNA
agggagtagaggcggccacg

SEQ ID NO: 9525 - RNA, 20 nt, synthetic construct
  source 1..20: mol_type = other RNA
agggagttttccacacggac

SEQ ID NO: 9526 - RNA, 20 nt, synthetic construct
  source 1..20: mol_type = other RNA
agggatgcctgtactgggca

SEQ ID NO: 9527 - RNA, 20 nt, synthetic construct
  source 1..20: mol_type = other RNA
agggatggttggtcactgtc

SEQ ID NO: 9528 - RNA, 20 nt, synthetic construct
  source 1..20: mol_type = other RNA
agggattcccttctcaggtt

SEQ ID NO: 9529 - RNA, 20 nt, synthetic construct
  source 1..20: mol_type = other RNA
agggcacgtgcggccccttc

SEQ ID NO: 9530 - RNA, 20 nt, synthetic construct
  source 1..20: mol_type = other RNA
agggccaagagcatgaggtc

SEQ ID NO: 9531 - RNA, 20 nt, synthetic construct
  source 1..20: mol_type = other RNA
agggccccgtgcagaggggg

SEQ ID NO: 9532 - RNA, 20 nt, synthetic construct
  source 1..20: mol_type = other RNA
agggccttagggaagcggga

SEQ ID NO: 9533 - RNA, 20 nt, synthetic construct
  source 1..20: mol_type = other RNA
agggcggaagggctggggcc

SEQ ID NO: 9534 - RNA, 20 nt, synthetic construct
  source 1..20: mol_type = other RNA
agggctatgcagggtggagg

SEQ ID NO: 9535 - RNA, 20 nt, synthetic construct
  source 1..20: mol_type = other RNA
agggctgaacagagaagagc

SEQ ID NO: 9536 - RNA, 20 nt, synthetic construct
  source 1..20: mol_type = other RNA
agggctggggcctggcctcc

SEQ ID NO: 9537 - RNA, 20 nt, synthetic construct
  source 1..20: mol_type = other RNA
agggctggggtggcctctcg

SEQ ID NO: 9538 - RNA, 20 nt, synthetic construct
  source 1..20: mol_type = other RNA
agggctgtggtgaggagggg

SEQ ID NO: 9539 - RNA, 20 nt, synthetic construct
  source 1..20: mol_type = other RNA
aggggaacggggatgcaggg

SEQ ID NO: 9540 - RNA, 20 nt, synthetic construct
  source 1..20: mol_type = other RNA
aggggaacggggctcagtct

SEQ ID NO: 9541 - RNA, 20 nt, synthetic construct
  source 1..20: mol_type = other RNA
aggggaagggggatgcaggg

SEQ ID NO: 9542 - RNA, 20 nt, synthetic construct
  source 1..20: mol_type = other RNA
aggggagctgggtttgggtc

SEQ ID NO: 9543 - RNA, 20 nt, synthetic construct
  source 1..20: mol_type = other RNA
aggggaggggggcaaggaga

SEQ ID NO: 9544 - RNA, 20 nt, synthetic construct
  source 1..20: mol_type = other RNA
aggggcaggagagccagggg

SEQ ID NO: 9545 - RNA, 20 nt, synthetic construct
  source 1..20: mol_type = other RNA
aggggcatgagatggtggac

SEQ ID NO: 9546 - RNA, 20 nt, synthetic construct
  source 1..20: mol_type = other RNA
aggggccgcacgtgccctgg

SEQ ID NO: 9547 - RNA, 20 nt, synthetic construct
  source 1..20: mol_type = other RNA
aggggcctgggcgggactcc

SEQ ID NO: 9548 - RNA, 20 nt, synthetic construct
  source 1..20: mol_type = other RNA
aggggctgacacgggccacc

SEQ ID NO: 9549 - RNA, 20 nt, synthetic construct
  source 1..20: mol_type = other RNA
aggggctggaacctcttccc

SEQ ID NO: 9550 - RNA, 20 nt, synthetic construct
  source 1..20: mol_type = other RNA
aggggctggagccaggattc

SEQ ID NO: 9551 - RNA, 20 nt, synthetic construct
  source 1..20: mol_type = other RNA
aggggctggggcctggactc

SEQ ID NO: 9552 - RNA, 20 nt, synthetic construct
  source 1..20: mol_type = other RNA
aggggctgggggccaggact

SEQ ID NO: 9553 - RNA, 20 nt, synthetic construct
  source 1..20: mol_type = other RNA
agggggacagggaagcctga

SEQ ID NO: 9554 - RNA, 20 nt, synthetic construct
  source 1..20: mol_type = other RNA
agggggatgcaggggaacgg

SEQ ID NO: 9555 - RNA, 20 nt, synthetic construct
  source 1..20: mol_type = other RNA
agggggcctcagtgaactgg

SEQ ID NO: 9556 - RNA, 20 nt, synthetic construct
  source 1..20: mol_type = other RNA
agggggcttctcatctgggt

SEQ ID NO: 9557 - RNA, 20 nt, synthetic construct
  source 1..20: mol_type = other RNA
aggggggcaaggagagcaat

SEQ ID NO: 9558 - RNA, 20 nt, synthetic construct
  source 1..20: mol_type = other RNA
aggggggcgatgcttgggga

SEQ ID NO: 9559 - RNA, 20 nt, synthetic construct
  source 1..20: mol_type = other RNA
aggggggtgtccgtgtggaa

SEQ ID NO: 9560 - RNA, 20 nt, synthetic construct
  source 1..20: mol_type = other RNA
agggggtcggaggagggact

SEQ ID NO: 9561 - RNA, 20 nt, synthetic construct
  source 1..20: mol_type = other RNA
agggggttgggggctagagt

SEQ ID NO: 9562 - RNA, 20 nt, synthetic construct
  source 1..20: mol_type = other RNA
aggggtccaaaacttggggg

SEQ ID NO: 9563 - RNA, 20 nt, synthetic construct
  source 1..20: mol_type = other RNA
aggggtccaggcccagcccc

SEQ ID NO: 9564 - RNA, 20 nt, synthetic construct
  source 1..20: mol_type = other RNA
aggggtgagacagctgcaca

SEQ ID NO: 9565 - RNA, 20 nt, synthetic construct
  source 1..20: mol_type = other RNA
aggggttcctggctctgctc

SEQ ID NO: 9566 - RNA, 20 nt, synthetic construct
  source 1..20: mol_type = other RNA
aggggttgggcctggactct

SEQ ID NO: 9567 - RNA, 20 nt, synthetic construct
  source 1..20: mol_type = other RNA
agggtaccagcctcaccaag

SEQ ID NO: 9568 - RNA, 20 nt, synthetic construct
  source 1..20: mol_type = other RNA
agggtaccccacgtgggttt

SEQ ID NO: 9569 - RNA, 20 nt, synthetic construct
  source 1..20: mol_type = other RNA
agggtagcgcagggtggcca

SEQ ID NO: 9570 - RNA, 20 nt, synthetic construct
  source 1..20: mol_type = other RNA
agggtcaagctcggaaacca

SEQ ID NO: 9571 - RNA, 20 nt, synthetic construct
  source 1..20: mol_type = other RNA
agggtcccgcttccctaagg

SEQ ID NO: 9572 - RNA, 20 nt, synthetic construct
  source 1..20: mol_type = other RNA
agggtggaggaaggccaccc

SEQ ID NO: 9573 - RNA, 20 nt, synthetic construct
  source 1..20: mol_type = other RNA
agggtggagggactgggggc

SEQ ID NO: 9574 - RNA, 20 nt, synthetic construct
  source 1..20: mol_type = other RNA
agggtggccactgagaaccg

SEQ ID NO: 9575 - RNA, 20 nt, synthetic construct
  source 1..20: mol_type = other RNA
agggtggccttcctccaccc

SEQ ID NO: 9576 - RNA, 20 nt, synthetic construct
  source 1..20: mol_type = other RNA
agggtttcagtgctaaaact

SEQ ID NO: 9577 - RNA, 20 nt, synthetic construct
  source 1..20: mol_type = other RNA
aggtaaaactgacgcacgga

SEQ ID NO: 9578 - RNA, 20 nt, synthetic construct
  source 1..20: mol_type = other RNA
aggtaccatgtggggttccc

SEQ ID NO: 9579 - RNA, 20 nt, synthetic construct
  source 1..20: mol_type = other RNA
aggtcatggaaactcgggct

SEQ ID NO: 9580 - RNA, 20 nt, synthetic construct
  source 1..20: mol_type = other RNA
aggtccccaagcatcgcccc

SEQ ID NO: 9581 - RNA, 20 nt, synthetic construct
  source 1..20: mol_type = other RNA
aggtcccggagcccacccag

SEQ ID NO: 9582 - RNA, 20 nt, synthetic construct
  source 1..20: mol_type = other RNA
aggtccttccaagggtcaag

SEQ ID NO: 9583 - RNA, 20 nt, synthetic construct
  source 1..20: mol_type = other RNA
aggtccttgaaagggaaagg

SEQ ID NO: 9584 - RNA, 20 nt, synthetic construct
  source 1..20: mol_type = other RNA
aggtcgtggccgcctctact

SEQ ID NO: 9585 - RNA, 20 nt, synthetic construct
  source 1..20: mol_type = other RNA
aggtctgggtgtggggtgac

SEQ ID NO: 9586 - RNA, 20 nt, synthetic construct
  source 1..20: mol_type = other RNA
aggtgaagagccaaagttag

SEQ ID NO: 9587 - RNA, 20 nt, synthetic construct
  source 1..20: mol_type = other RNA
aggtgagggacttggggggt

SEQ ID NO: 9588 - RNA, 20 nt, synthetic construct
  source 1..20: mol_type = other RNA
aggtggagaaactggccggg

SEQ ID NO: 9589 - RNA, 20 nt, synthetic construct
  source 1..20: mol_type = other RNA
aggtggcctggggcctctgg

SEQ ID NO: 9590 - RNA, 20 nt, synthetic construct
  source 1..20: mol_type = other RNA
aggtggcgcttccagtgctc

SEQ ID NO: 9591 - RNA, 20 nt, synthetic construct
  source 1..20: mol_type = other RNA
aggtgtgcagctgtctcacc

SEQ ID NO: 9592 - RNA, 20 nt, synthetic construct
  source 1..20: mol_type = other RNA
aggtgttcaccaggtcgtgg

SEQ ID NO: 9593 - RNA, 20 nt, synthetic construct
  source 1..20: mol_type = other RNA
aggttacgtggccaagaagc

SEQ ID NO: 9594 - RNA, 20 nt, synthetic construct
  source 1..20: mol_type = other RNA
aggttccagcccctcctcct

SEQ ID NO: 9595 - RNA, 20 nt, synthetic construct
  source 1..20: mol_type = other RNA
aggttctgggagagggtagc

SEQ ID NO: 9596 - RNA, 20 nt, synthetic construct
  source 1..20: mol_type = other RNA
agtacaggcatccctgtgaa

SEQ ID NO: 9597 - RNA, 20 nt, synthetic construct
  source 1..20: mol_type = other RNA
agtagaggcggccacgacct

SEQ ID NO: 9598 - RNA, 20 nt, synthetic construct
  source 1..20: mol_type = other RNA
agtagccagccccgtcctgg

SEQ ID NO: 9599 - RNA, 20 nt, synthetic construct
  source 1..20: mol_type = other RNA
agtaggaggggctggagcca

SEQ ID NO: 9600 - RNA, 20 nt, synthetic construct
  source 1..20: mol_type = other RNA
agtaggtggcctggggcctc

SEQ ID NO: 9601 - RNA, 20 nt, synthetic construct
  source 1..20: mol_type = other RNA
agtatctgctggggtggttt

SEQ ID NO: 9602 - RNA, 20 nt, synthetic construct
  source 1..20: mol_type = other RNA
agtcacccagagacagtgac

SEQ ID NO: 9603 - RNA, 20 nt, synthetic construct
  source 1..20: mol_type = other RNA
agtcaccccacagttggagg

SEQ ID NO: 9604 - RNA, 20 nt, synthetic construct
  source 1..20: mol_type = other RNA
agtccaggcccaacccctcc

SEQ ID NO: 9605 - RNA, 20 nt, synthetic construct
  source 1..20: mol_type = other RNA
agtccaggcccccagcctct

SEQ ID NO: 9606 - RNA, 20 nt, synthetic construct
  source 1..20: mol_type = other RNA
agtccaggcccccagtccct

SEQ ID NO: 9607 - RNA, 20 nt, synthetic construct
  source 1..20: mol_type = other RNA
agtccagggggtcggaggag

SEQ ID NO: 9608 - RNA, 20 nt, synthetic construct
  source 1..20: mol_type = other RNA
agtccccaatttatattgtt

SEQ ID NO: 9609 - RNA, 20 nt, synthetic construct
  source 1..20: mol_type = other RNA
agtccccagtgctatctggg

SEQ ID NO: 9610 - RNA, 20 nt, synthetic construct
  source 1..20: mol_type = other RNA
agtcccgacttgctgggaca

SEQ ID NO: 9611 - RNA, 20 nt, synthetic construct
  source 1..20: mol_type = other RNA
agtcccgcccaggcccctga

SEQ ID NO: 9612 - RNA, 20 nt, synthetic construct
  source 1..20: mol_type = other RNA
agtccctcacctctccaaag

SEQ ID NO: 9613 - RNA, 20 nt, synthetic construct
  source 1..20: mol_type = other RNA
agtccctccaccctcagacc

SEQ ID NO: 9614 - RNA, 20 nt, synthetic construct
  source 1..20: mol_type = other RNA
agtccctcctccgaccccct

SEQ ID NO: 9615 - RNA, 20 nt, synthetic construct
  source 1..20: mol_type = other RNA
agtccctggtgcccaggcct

SEQ ID NO: 9616 - RNA, 20 nt, synthetic construct
  source 1..20: mol_type = other RNA
agtcctaggaaaacagggat

SEQ ID NO: 9617 - RNA, 20 nt, synthetic construct
  source 1..20: mol_type = other RNA
agtcctggcccccagcccct

SEQ ID NO: 9618 - RNA, 20 nt, synthetic construct
  source 1..20: mol_type = other RNA
agtccttggcaagcccagga

SEQ ID NO: 9619 - RNA, 20 nt, synthetic construct
  source 1..20: mol_type = other RNA
agtcctttcgtggtttccac

SEQ ID NO: 9620 - RNA, 20 nt, synthetic construct
  source 1..20: mol_type = other RNA
agtcgggactccagagggag

SEQ ID NO: 9621 - RNA, 20 nt, synthetic construct
  source 1..20: mol_type = other RNA
agtctgaagagcagagccag

SEQ ID NO: 9622 - RNA, 20 nt, synthetic construct
  source 1..20: mol_type = other RNA
agtctgagcactggaagcgc

SEQ ID NO: 9623 - RNA, 20 nt, synthetic construct
  source 1..20: mol_type = other RNA
agtctgtcccagcacagggt

SEQ ID NO: 9624 - RNA, 20 nt, synthetic construct
  source 1..20: mol_type = other RNA
agtgaaacgcaccagacggc

SEQ ID NO: 9625 - RNA, 20 nt, synthetic construct
  source 1..20: mol_type = other RNA
agtgaacggggaagggaggg

SEQ ID NO: 9626 - RNA, 20 nt, synthetic construct
  source 1..20: mol_type = other RNA
agtgaactggagtgtgacag

SEQ ID NO: 9627 - RNA, 20 nt, synthetic construct
  source 1..20: mol_type = other RNA
agtgaagctaaactcctaga

SEQ ID NO: 9628 - RNA, 20 nt, synthetic construct
  source 1..20: mol_type = other RNA
agtgaccaaccatccctgtt

SEQ ID NO: 9629 - RNA, 20 nt, synthetic construct
  source 1..20: mol_type = other RNA
agtgagtttgccaagcagtc

SEQ ID NO: 9630 - RNA, 20 nt, synthetic construct
  source 1..20: mol_type = other RNA
agtgctaaaactaggctgtc

SEQ ID NO: 9631 - RNA, 20 nt, synthetic construct
  source 1..20: mol_type = other RNA
agtgctatctgggacatatt

SEQ ID NO: 9632 - RNA, 20 nt, synthetic construct
  source 1..20: mol_type = other RNA
agtgctcagactagggaaga

SEQ ID NO: 9633 - RNA, 20 nt, synthetic construct
  source 1..20: mol_type = other RNA
agtgctcagtggaaaccacg

SEQ ID NO: 9634 - RNA, 20 nt, synthetic construct
  source 1..20: mol_type = other RNA
agtggaaaccacgaaaggac

SEQ ID NO: 9635 - RNA, 20 nt, synthetic construct
  source 1..20: mol_type = other RNA
agtggccaccctgcgctacc

SEQ ID NO: 9636 - RNA, 20 nt, synthetic construct
  source 1..20: mol_type = other RNA
agtggccagaggctgttggg

SEQ ID NO: 9637 - RNA, 20 nt, synthetic construct
  source 1..20: mol_type = other RNA
agtggctagggggttggggg

SEQ ID NO: 9638 - RNA, 20 nt, synthetic construct
  source 1..20: mol_type = other RNA
agtggggaaaatgacccaac

SEQ ID NO: 9639 - RNA, 20 nt, synthetic construct
  source 1..20: mol_type = other RNA
agtggtcaggccggccaggc

SEQ ID NO: 9640 - RNA, 20 nt, synthetic construct
  source 1..20: mol_type = other RNA
agtggttgataaacccacgt

SEQ ID NO: 9641 - RNA, 20 nt, synthetic construct
  source 1..20: mol_type = other RNA
agtgtaaggaagctgcagca

SEQ ID NO: 9642 - RNA, 20 nt, synthetic construct
  source 1..20: mol_type = other RNA
agtgtccacaaggcctgggg

SEQ ID NO: 9643 - RNA, 20 nt, synthetic construct
  source 1..20: mol_type = other RNA
agtgtgacagcctggggccc

SEQ ID NO: 9644 - RNA, 20 nt, synthetic construct
  source 1..20: mol_type = other RNA
agttagaactcaggaccaac

SEQ ID NO: 9645 - RNA, 20 nt, synthetic construct
  source 1..20: mol_type = other RNA
agttcactgaggccccctct

SEQ ID NO: 9646 - RNA, 20 nt, synthetic construct
  source 1..20: mol_type = other RNA
agttcaggtcccggagccca

SEQ ID NO: 9647 - RNA, 20 nt, synthetic construct
  source 1..20: mol_type = other RNA
agttcatcccgttcccaggg

SEQ ID NO: 9648 - RNA, 20 nt, synthetic construct
  source 1..20: mol_type = other RNA
agttctaactttggctcttc

SEQ ID NO: 9649 - RNA, 20 nt, synthetic construct
  source 1..20: mol_type = other RNA
agttcttagggtaccccacg

SEQ ID NO: 9650 - RNA, 20 nt, synthetic construct
  source 1..20: mol_type = other RNA
agttggaggagaatccaccc

SEQ ID NO: 9651 - RNA, 20 nt, synthetic construct
  source 1..20: mol_type = other RNA
agttggtcctgagttctaac

SEQ ID NO: 9652 - RNA, 20 nt, synthetic construct
  source 1..20: mol_type = other RNA
agttgtcatggcgatagggg

SEQ ID NO: 9653 - RNA, 20 nt, synthetic construct
  source 1..20: mol_type = other RNA
agtttagcttcactccttcc

SEQ ID NO: 9654 - RNA, 20 nt, synthetic construct
  source 1..20: mol_type = other RNA
agtttccatgacctcatgct

SEQ ID NO: 9655 - RNA, 20 nt, synthetic construct
  source 1..20: mol_type = other RNA
agtttctccacctggggctg

SEQ ID NO: 9656 - RNA, 20 nt, synthetic construct
  source 1..20: mol_type = other RNA
agtttgccaagcagtcaccc

SEQ ID NO: 9657 - RNA, 20 nt, synthetic construct
  source 1..20: mol_type = other RNA
agtttggaaaaacaaaatca

SEQ ID NO: 9658 - RNA, 20 nt, synthetic construct
  source 1..20: mol_type = other RNA
agttttacctgtgagataag

SEQ ID NO: 9659 - RNA, 20 nt, synthetic construct
  source 1..20: mol_type = other RNA
agttttagcactgaaaccct

SEQ ID NO: 9660 - RNA, 20 nt, synthetic construct
  source 1..20: mol_type = other RNA
agttttccacacggacaccc

SEQ ID NO: 9661 - RNA, 20 nt, synthetic construct
  source 1..20: mol_type = other RNA
agttttggacccctaaggga

SEQ ID NO: 9662 - RNA, 20 nt, synthetic construct
  source 1..20: mol_type = other RNA
ataaacccacgtggggtacc

SEQ ID NO: 9663 - RNA, 20 nt, synthetic construct
  source 1..20: mol_type = other RNA
ataaacgagccgagttcatc

SEQ ID NO: 9664 - RNA, 20 nt, synthetic construct
  source 1..20: mol_type = other RNA
ataaattaccccccaagtcc

SEQ ID NO: 9665 - RNA, 20 nt, synthetic construct
  source 1..20: mol_type = other RNA
ataaattggggactagaaag

SEQ ID NO: 9666 - RNA, 20 nt, synthetic construct
  source 1..20: mol_type = other RNA
ataagctggtcaccccacac

SEQ ID NO: 9667 - RNA, 20 nt, synthetic construct
  source 1..20: mol_type = other RNA
ataaggccagtagccagccc

SEQ ID NO: 9668 - RNA, 20 nt, synthetic construct
  source 1..20: mol_type = other RNA
ataagttggtcctgagttct

SEQ ID NO: 9669 - RNA, 20 nt, synthetic construct
  source 1..20: mol_type = other RNA
ataccccgaagagtgagttt

SEQ ID NO: 9670 - RNA, 20 nt, synthetic construct
  source 1..20: mol_type = other RNA
atacgcctggttgcccagtg

SEQ ID NO: 9671 - RNA, 20 nt, synthetic construct
  source 1..20: mol_type = other RNA
atactctgcaggaacgaagc

SEQ ID NO: 9672 - RNA, 20 nt, synthetic construct
  source 1..20: mol_type = other RNA
atagcactggggactcttta

SEQ ID NO: 9673 - RNA, 20 nt, synthetic construct
  source 1..20: mol_type = other RNA
atagccaggagtcctttcgt

SEQ ID NO: 9674 - RNA, 20 nt, synthetic construct
  source 1..20: mol_type = other RNA
atagccctgggcccacggct

SEQ ID NO: 9675 - RNA, 20 nt, synthetic construct
  source 1..20: mol_type = other RNA
ataggggaggggggcaagga

SEQ ID NO: 9676 - RNA, 20 nt, synthetic construct
  source 1..20: mol_type = other RNA
atataaattggggactagaa

SEQ ID NO: 9677 - RNA, 20 nt, synthetic construct
  source 1..20: mol_type = other RNA
atatgtcccagatagcactg

SEQ ID NO: 9678 - RNA, 20 nt, synthetic construct
  source 1..20: mol_type = other RNA
atattcctccgcccagagca

SEQ ID NO: 9679 - RNA, 20 nt, synthetic construct
  source 1..20: mol_type = other RNA
atattgttcctccgtgcgtc

SEQ ID NO: 9680 - RNA, 20 nt, synthetic construct
  source 1..20: mol_type = other RNA
atcaaccacttggtgaggct

SEQ ID NO: 9681 - RNA, 20 nt, synthetic construct
  source 1..20: mol_type = other RNA
atcaagagtcacccagagac

SEQ ID NO: 9682 - RNA, 20 nt, synthetic construct
  source 1..20: mol_type = other RNA
atcagaataagttggtcctg

SEQ ID NO: 9683 - RNA, 20 nt, synthetic construct
  source 1..20: mol_type = other RNA
atcagtgaaacgcaccagac

SEQ ID NO: 9684 - RNA, 20 nt, synthetic construct
  source 1..20: mol_type = other RNA
atccacccaaaaggcagcct

SEQ ID NO: 9685 - RNA, 20 nt, synthetic construct
  source 1..20: mol_type = other RNA
atccacgggataaattaccc

SEQ ID NO: 9686 - RNA, 20 nt, synthetic construct
  source 1..20: mol_type = other RNA
atccagggacacggtgctag

SEQ ID NO: 9687 - RNA, 20 nt, synthetic construct
  source 1..20: mol_type = other RNA
atcccaggaggcctggagca

SEQ ID NO: 9688 - RNA, 20 nt, synthetic construct
  source 1..20: mol_type = other RNA
atcccccagaggccccaggc

SEQ ID NO: 9689 - RNA, 20 nt, synthetic construct
  source 1..20: mol_type = other RNA
atcccccttcccctgcatcc

SEQ ID NO: 9690 - RNA, 20 nt, synthetic construct
  source 1..20: mol_type = other RNA
atccccgttcccctgcatcc

SEQ ID NO: 9691 - RNA, 20 nt, synthetic construct
  source 1..20: mol_type = other RNA
atcccgtggatctaggagtt

SEQ ID NO: 9692 - RNA, 20 nt, synthetic construct
  source 1..20: mol_type = other RNA
atcccgttcccagggcacgt

SEQ ID NO: 9693 - RNA, 20 nt, synthetic construct
  source 1..20: mol_type = other RNA
atccctcctctctgaacccc

SEQ ID NO: 9694 - RNA, 20 nt, synthetic construct
  source 1..20: mol_type = other RNA
atccctgtgaaagatgcctg

SEQ ID NO: 9695 - RNA, 20 nt, synthetic construct
  source 1..20: mol_type = other RNA
atccctgttttcctaggact

SEQ ID NO: 9696 - RNA, 20 nt, synthetic construct
  source 1..20: mol_type = other RNA
atcctggctccagcccctcc

SEQ ID NO: 9697 - RNA, 20 nt, synthetic construct
  source 1..20: mol_type = other RNA
atcctggtgctgcagcttcc

SEQ ID NO: 9698 - RNA, 20 nt, synthetic construct
  source 1..20: mol_type = other RNA
atccttctccaggcaggtcc

SEQ ID NO: 9699 - RNA, 20 nt, synthetic construct
  source 1..20: mol_type = other RNA
atccttctttccttaaagag

SEQ ID NO: 9700 - RNA, 20 nt, synthetic construct
  source 1..20: mol_type = other RNA
atcgccatgacaactgggtg

SEQ ID NO: 9701 - RNA, 20 nt, synthetic construct
  source 1..20: mol_type = other RNA
atcgcccccctgctgtggct

SEQ ID NO: 9702 - RNA, 20 nt, synthetic construct
  source 1..20: mol_type = other RNA
atctaggagtttagcttcac

SEQ ID NO: 9703 - RNA, 20 nt, synthetic construct
  source 1..20: mol_type = other RNA
atctcacaggtaaaactgac

SEQ ID NO: 9704 - RNA, 20 nt, synthetic construct
  source 1..20: mol_type = other RNA
atctcatgcccctggctctc

SEQ ID NO: 9705 - RNA, 20 nt, synthetic construct
  source 1..20: mol_type = other RNA
atctgagggcggaagggctg

SEQ ID NO: 9706 - RNA, 20 nt, synthetic construct
  source 1..20: mol_type = other RNA
atctgcaaacaggaagtgaa

SEQ ID NO: 9707 - RNA, 20 nt, synthetic construct
  source 1..20: mol_type = other RNA
atctgctggggtggtttccg

SEQ ID NO: 9708 - RNA, 20 nt, synthetic construct
  source 1..20: mol_type = other RNA
atctggaggaggcgggaggg

SEQ ID NO: 9709 - RNA, 20 nt, synthetic construct
  source 1..20: mol_type = other RNA
atctgggacatattcctccg

SEQ ID NO: 9710 - RNA, 20 nt, synthetic construct
  source 1..20: mol_type = other RNA
atctgggtgcgggaacccca

SEQ ID NO: 9711 - RNA, 20 nt, synthetic construct
  source 1..20: mol_type = other RNA
atctgttttcgtggctccct

SEQ ID NO: 9712 - RNA, 20 nt, synthetic construct
  source 1..20: mol_type = other RNA
atcttaaacagccagtggcc

SEQ ID NO: 9713 - RNA, 20 nt, synthetic construct
  source 1..20: mol_type = other RNA
atctttcacagggatgcctg

SEQ ID NO: 9714 - RNA, 20 nt, synthetic construct
  source 1..20: mol_type = other RNA
atgaactcggctcgtttatt

SEQ ID NO: 9715 - RNA, 20 nt, synthetic construct
  source 1..20: mol_type = other RNA
atgaaggagtccaggccccc

SEQ ID NO: 9716 - RNA, 20 nt, synthetic construct
  source 1..20: mol_type = other RNA
atgacaactgggtggaaata

SEQ ID NO: 9717 - RNA, 20 nt, synthetic construct
  source 1..20: mol_type = other RNA
atgacccaacagcctctggc

SEQ ID NO: 9718 - RNA, 20 nt, synthetic construct
  source 1..20: mol_type = other RNA
atgacctcatgctcttggcc

SEQ ID NO: 9719 - RNA, 20 nt, synthetic construct
  source 1..20: mol_type = other RNA
atgagaaacggtggcccgtg

SEQ ID NO: 9720 - RNA, 20 nt, synthetic construct
  source 1..20: mol_type = other RNA
atgagaagccccctcccttc

SEQ ID NO: 9721 - RNA, 20 nt, synthetic construct
  source 1..20: mol_type = other RNA
atgagatggtggacgaggaa

SEQ ID NO: 9722 - RNA, 20 nt, synthetic construct
  source 1..20: mol_type = other RNA
atgaggtcatggaaactcgg

SEQ ID NO: 9723 - RNA, 20 nt, synthetic construct
  source 1..20: mol_type = other RNA
atgcaggacgagaaacacag

SEQ ID NO: 9724 - RNA, 20 nt, synthetic construct
  source 1..20: mol_type = other RNA
atgcaggggaacggggatgc

SEQ ID NO: 9725 - RNA, 20 nt, synthetic construct
  source 1..20: mol_type = other RNA
atgcaggggaacggggctca

SEQ ID NO: 9726 - RNA, 20 nt, synthetic construct
  source 1..20: mol_type = other RNA
atgcaggggaagggggatgc

SEQ ID NO: 9727 - RNA, 20 nt, synthetic construct
  source 1..20: mol_type = other RNA
atgcagggtggaggaaggcc

SEQ ID NO: 9728 - RNA, 20 nt, synthetic construct
  source 1..20: mol_type = other RNA
atgcccctggctctcctgcc

SEQ ID NO: 9729 - RNA, 20 nt, synthetic construct
  source 1..20: mol_type = other RNA
atgcctgaggcctgggcacc

SEQ ID NO: 9730 - RNA, 20 nt, synthetic construct
  source 1..20: mol_type = other RNA
atgcctgtactgggcaggtc

SEQ ID NO: 9731 - RNA, 20 nt, synthetic construct
  source 1..20: mol_type = other RNA
atgcgtgacctgcccggttc

SEQ ID NO: 9732 - RNA, 20 nt, synthetic construct
  source 1..20: mol_type = other RNA
atgctccaggcctcctggga

SEQ ID NO: 9733 - RNA, 20 nt, synthetic construct
  source 1..20: mol_type = other RNA
atgctcttggccctcgtagc

SEQ ID NO: 9734 - RNA, 20 nt, synthetic construct
  source 1..20: mol_type = other RNA
atgctgtttgcccaggacag

SEQ ID NO: 9735 - RNA, 20 nt, synthetic construct
  source 1..20: mol_type = other RNA
atgcttggggacctgcctgg

SEQ ID NO: 9736 - RNA, 20 nt, synthetic construct
  source 1..20: mol_type = other RNA
atggaaactcgggctgtgaa

SEQ ID NO: 9737 - RNA, 20 nt, synthetic construct
  source 1..20: mol_type = other RNA
atggagaaagagaaagggag

SEQ ID NO: 9738 - RNA, 20 nt, synthetic construct
  source 1..20: mol_type = other RNA
atggcgataggggagggggg

SEQ ID NO: 9739 - RNA, 20 nt, synthetic construct
  source 1..20: mol_type = other RNA
atgggcagctttggagaggt

SEQ ID NO: 9740 - RNA, 20 nt, synthetic construct
  source 1..20: mol_type = other RNA
atgggcctttccctttcaag

SEQ ID NO: 9741 - RNA, 20 nt, synthetic construct
  source 1..20: mol_type = other RNA
atggggagaggctgggggcc

SEQ ID NO: 9742 - RNA, 20 nt, synthetic construct
  source 1..20: mol_type = other RNA
atggggaggggttgggcctg

SEQ ID NO: 9743 - RNA, 20 nt, synthetic construct
  source 1..20: mol_type = other RNA
atgggggcagggtaccagcc

SEQ ID NO: 9744 - RNA, 20 nt, synthetic construct
  source 1..20: mol_type = other RNA
atggtacctgttagacacgg

SEQ ID NO: 9745 - RNA, 20 nt, synthetic construct
  source 1..20: mol_type = other RNA
atggtgcgtcctaggtgttc

SEQ ID NO: 9746 - RNA, 20 nt, synthetic construct
  source 1..20: mol_type = other RNA
atggtggacgaggaaggggg

SEQ ID NO: 9747 - RNA, 20 nt, synthetic construct
  source 1..20: mol_type = other RNA
atggttggtcactgtctctg

SEQ ID NO: 9748 - RNA, 20 nt, synthetic construct
  source 1..20: mol_type = other RNA
atgtcccagatagcactggg

SEQ ID NO: 9749 - RNA, 20 nt, synthetic construct
  source 1..20: mol_type = other RNA
atgtggggttcccgcaccca

SEQ ID NO: 9750 - RNA, 20 nt, synthetic construct
  source 1..20: mol_type = other RNA
attaccccccaagtccctca

SEQ ID NO: 9751 - RNA, 20 nt, synthetic construct
  source 1..20: mol_type = other RNA
attcaacccaggaggccagg

SEQ ID NO: 9752 - RNA, 20 nt, synthetic construct
  source 1..20: mol_type = other RNA
attcagacccaggggtccag

SEQ ID NO: 9753 - RNA, 20 nt, synthetic construct
  source 1..20: mol_type = other RNA
attcccggccagtttctcca

SEQ ID NO: 9754 - RNA, 20 nt, synthetic construct
  source 1..20: mol_type = other RNA
attcccttctcaggttacgt

SEQ ID NO: 9755 - RNA, 20 nt, synthetic construct
  source 1..20: mol_type = other RNA
attcctccgcccagagcagg

SEQ ID NO: 9756 - RNA, 20 nt, synthetic construct
  source 1..20: mol_type = other RNA
attcctgcaccccaattgcc

SEQ ID NO: 9757 - RNA, 20 nt, synthetic construct
  source 1..20: mol_type = other RNA
attctcacaaagggagtttt

SEQ ID NO: 9758 - RNA, 20 nt, synthetic construct
  source 1..20: mol_type = other RNA
attctcctccaactgtgggg

SEQ ID NO: 9759 - RNA, 20 nt, synthetic construct
  source 1..20: mol_type = other RNA
attctgattttgtttttcca

SEQ ID NO: 9760 - RNA, 20 nt, synthetic construct
  source 1..20: mol_type = other RNA
attcttagggctgaacagag

SEQ ID NO: 9761 - RNA, 20 nt, synthetic construct
  source 1..20: mol_type = other RNA
attcttcccttaggggtcca

SEQ ID NO: 9762 - RNA, 20 nt, synthetic construct
  source 1..20: mol_type = other RNA
attgccttagtggctagggg

SEQ ID NO: 9763 - RNA, 20 nt, synthetic construct
  source 1..20: mol_type = other RNA
attgctctccttgcccccct

SEQ ID NO: 9764 - RNA, 20 nt, synthetic construct
  source 1..20: mol_type = other RNA
attggggactagaaaggtga

SEQ ID NO: 9765 - RNA, 20 nt, synthetic construct
  source 1..20: mol_type = other RNA
attggggtgcaggaatgggg

SEQ ID NO: 9766 - RNA, 20 nt, synthetic construct
  source 1..20: mol_type = other RNA
attggggtgggctggggttc

SEQ ID NO: 9767 - RNA, 20 nt, synthetic construct
  source 1..20: mol_type = other RNA
attgttcctccgtgcgtcag

SEQ ID NO: 9768 - RNA, 20 nt, synthetic construct
  source 1..20: mol_type = other RNA
atttatattgttcctccgtg

SEQ ID NO: 9769 - RNA, 20 nt, synthetic construct
  source 1..20: mol_type = other RNA
atttatcccgtggatctagg

SEQ ID NO: 9770 - RNA, 20 nt, synthetic construct
  source 1..20: mol_type = other RNA
atttccacccagttgtcatg

SEQ ID NO: 9771 - RNA, 20 nt, synthetic construct
  source 1..20: mol_type = other RNA
attttccccactgtcctagc

SEQ ID NO: 9772 - RNA, 20 nt, synthetic construct
  source 1..20: mol_type = other RNA
attttgtttttccaaactgc

SEQ ID NO: 9773 - RNA, 20 nt, synthetic construct
  source 1..20: mol_type = other RNA
caaaacccccgtcaccaccc

SEQ ID NO: 9774 - RNA, 20 nt, synthetic construct
  source 1..20: mol_type = other RNA
caaaacttggggggacaaaa

SEQ ID NO: 9775 - RNA, 20 nt, synthetic construct
  source 1..20: mol_type = other RNA
caaaagccgaagtccagggg

SEQ ID NO: 9776 - RNA, 20 nt, synthetic construct
  source 1..20: mol_type = other RNA
caaaaggcagcctggtagac

SEQ ID NO: 9777 - RNA, 20 nt, synthetic construct
  source 1..20: mol_type = other RNA
caaaatcagaataagttggt

SEQ ID NO: 9778 - RNA, 20 nt, synthetic construct
  source 1..20: mol_type = other RNA
caaacagcataagctggtca

SEQ ID NO: 9779 - RNA, 20 nt, synthetic construct
  source 1..20: mol_type = other RNA
caaacaggaagtgaacgggg

SEQ ID NO: 9780 - RNA, 20 nt, synthetic construct
  source 1..20: mol_type = other RNA
caaacccagaagcccagagc

SEQ ID NO: 9781 - RNA, 20 nt, synthetic construct
  source 1..20: mol_type = other RNA
caaacccagctcccctgctt

SEQ ID NO: 9782 - RNA, 20 nt, synthetic construct
  source 1..20: mol_type = other RNA
caaacccaggagcccaggcc

SEQ ID NO: 9783 - RNA, 20 nt, synthetic construct
  source 1..20: mol_type = other RNA
caaactcactcttcggggta

SEQ ID NO: 9784 - RNA, 20 nt, synthetic construct
  source 1..20: mol_type = other RNA
caaactgcttctcctcttgg

SEQ ID NO: 9785 - RNA, 20 nt, synthetic construct
  source 1..20: mol_type = other RNA
caaagctgcccatctggagg

SEQ ID NO: 9786 - RNA, 20 nt, synthetic construct
  source 1..20: mol_type = other RNA
caaagggagttttccacacg

SEQ ID NO: 9787 - RNA, 20 nt, synthetic construct
  source 1..20: mol_type = other RNA
caaagttagaactcaggacc

SEQ ID NO: 9788 - RNA, 20 nt, synthetic construct
  source 1..20: mol_type = other RNA
caacagcctctggccactgg

SEQ ID NO: 9789 - RNA, 20 nt, synthetic construct
  source 1..20: mol_type = other RNA
caaccacttggtgaggctgg

SEQ ID NO: 9790 - RNA, 20 nt, synthetic construct
  source 1..20: mol_type = other RNA
caaccaggcgtatcttaaac

SEQ ID NO: 9791 - RNA, 20 nt, synthetic construct
  source 1..20: mol_type = other RNA
caaccatccctgttttccta

SEQ ID NO: 9792 - RNA, 20 nt, synthetic construct
  source 1..20: mol_type = other RNA
caacccaggaggccaggccc

SEQ ID NO: 9793 - RNA, 20 nt, synthetic construct
  source 1..20: mol_type = other RNA
caaccccctagccactaagg

SEQ ID NO: 9794 - RNA, 20 nt, synthetic construct
  source 1..20: mol_type = other RNA
caacccctccccattcaacc

SEQ ID NO: 9795 - RNA, 20 nt, synthetic construct
  source 1..20: mol_type = other RNA
caactgggtggaaataaacg

SEQ ID NO: 9796 - RNA, 20 nt, synthetic construct
  source 1..20: mol_type = other RNA
caactgtggggtgactgctt

SEQ ID NO: 9797 - RNA, 20 nt, synthetic construct
  source 1..20: mol_type = other RNA
caacttattctgattttgtt

SEQ ID NO: 9798 - RNA, 20 nt, synthetic construct
  source 1..20: mol_type = other RNA
caagaagcaggggagctggg

SEQ ID NO: 9799 - RNA, 20 nt, synthetic construct
  source 1..20: mol_type = other RNA
caagagcatgaggtcatgga

SEQ ID NO: 9800 - RNA, 20 nt, synthetic construct
  source 1..20: mol_type = other RNA
caagaggagaagcagtttgg

SEQ ID NO: 9801 - RNA, 20 nt, synthetic construct
  source 1..20: mol_type = other RNA
caagagtcacccagagacag

SEQ ID NO: 9802 - RNA, 20 nt, synthetic construct
  source 1..20: mol_type = other RNA
caagcagtcaccccacagtt

SEQ ID NO: 9803 - RNA, 20 nt, synthetic construct
  source 1..20: mol_type = other RNA
caagcatcgcccccctgctg

SEQ ID NO: 9804 - RNA, 20 nt, synthetic construct
  source 1..20: mol_type = other RNA
caagcccaggagaggcgctc

SEQ ID NO: 9805 - RNA, 20 nt, synthetic construct
  source 1..20: mol_type = other RNA
caagctcggaaaccacccca

SEQ ID NO: 9806 - RNA, 20 nt, synthetic construct
  source 1..20: mol_type = other RNA
caaggacctgcccagtacag

SEQ ID NO: 9807 - RNA, 20 nt, synthetic construct
  source 1..20: mol_type = other RNA
caaggactcaaacccagaag

SEQ ID NO: 9808 - RNA, 20 nt, synthetic construct
  source 1..20: mol_type = other RNA
caaggagagcaatgggcctt

SEQ ID NO: 9809 - RNA, 20 nt, synthetic construct
  source 1..20: mol_type = other RNA
caaggcctggggcaagtccc

SEQ ID NO: 9810 - RNA, 20 nt, synthetic construct
  source 1..20: mol_type = other RNA
caagggtcaagctcggaaac

SEQ ID NO: 9811 - RNA, 20 nt, synthetic construct
  source 1..20: mol_type = other RNA
caagtaggtggcctggggcc

SEQ ID NO: 9812 - RNA, 20 nt, synthetic construct
  source 1..20: mol_type = other RNA
caagtccctcacctctccaa

SEQ ID NO: 9813 - RNA, 20 nt, synthetic construct
  source 1..20: mol_type = other RNA
caagtccctcctccgacccc

SEQ ID NO: 9814 - RNA, 20 nt, synthetic construct
  source 1..20: mol_type = other RNA
caagtcgggactccagaggg

SEQ ID NO: 9815 - RNA, 20 nt, synthetic construct
  source 1..20: mol_type = other RNA
caagtggttgataaacccac

SEQ ID NO: 9816 - RNA, 20 nt, synthetic construct
  source 1..20: mol_type = other RNA
caagttcttagggtacccca

SEQ ID NO: 9817 - RNA, 20 nt, synthetic construct
  source 1..20: mol_type = other RNA
caagttttggacccctaagg

SEQ ID NO: 9818 - RNA, 20 nt, synthetic construct
  source 1..20: mol_type = other RNA
caatataaattggggactag

SEQ ID NO: 9819 - RNA, 20 nt, synthetic construct
  source 1..20: mol_type = other RNA
caatgctccaggcctcctgg

SEQ ID NO: 9820 - RNA, 20 nt, synthetic construct
  source 1..20: mol_type = other RNA
caatgggcctttccctttca

SEQ ID NO: 9821 - RNA, 20 nt, synthetic construct
  source 1..20: mol_type = other RNA
caattgccttagtggctagg

SEQ ID NO: 9822 - RNA, 20 nt, synthetic construct
  source 1..20: mol_type = other RNA
caattggggtgcaggaatgg

SEQ ID NO: 9823 - RNA, 20 nt, synthetic construct
  source 1..20: mol_type = other RNA
caatttatattgttcctccg

SEQ ID NO: 9824 - RNA, 20 nt, synthetic construct
  source 1..20: mol_type = other RNA
cacaaagggagttttccaca

SEQ ID NO: 9825 - RNA, 20 nt, synthetic construct
  source 1..20: mol_type = other RNA
cacaaggcctggggcaagtc

SEQ ID NO: 9826 - RNA, 20 nt, synthetic construct
  source 1..20: mol_type = other RNA
cacacaggtgtgcagctgtc

SEQ ID NO: 9827 - RNA, 20 nt, synthetic construct
  source 1..20: mol_type = other RNA
cacacccagacctgacccaa

SEQ ID NO: 9828 - RNA, 20 nt, synthetic construct
  source 1..20: mol_type = other RNA
cacacctgtgtgcctgggcc

SEQ ID NO: 9829 - RNA, 20 nt, synthetic construct
  source 1..20: mol_type = other RNA
cacacggacacccccctcct

SEQ ID NO: 9830 - RNA, 20 nt, synthetic construct
  source 1..20: mol_type = other RNA
cacactccagttcactgagg

SEQ ID NO: 9831 - RNA, 20 nt, synthetic construct
  source 1..20: mol_type = other RNA
cacagcaggggggcgatgct

SEQ ID NO: 9832 - RNA, 20 nt, synthetic construct
  source 1..20: mol_type = other RNA
cacagccccaggtggagaaa

SEQ ID NO: 9833 - RNA, 20 nt, synthetic construct
  source 1..20: mol_type = other RNA
cacagcccgagtttccatga

SEQ ID NO: 9834 - RNA, 20 nt, synthetic construct
  source 1..20: mol_type = other RNA
cacagccctgccaggacggg

SEQ ID NO: 9835 - RNA, 20 nt, synthetic construct
  source 1..20: mol_type = other RNA
cacagggatgcctgtactgg

SEQ ID NO: 9836 - RNA, 20 nt, synthetic construct
  source 1..20: mol_type = other RNA
cacagggtggccttcctcca

SEQ ID NO: 9837 - RNA, 20 nt, synthetic construct
  source 1..20: mol_type = other RNA
cacaggtaaaactgacgcac

SEQ ID NO: 9838 - RNA, 20 nt, synthetic construct
  source 1..20: mol_type = other RNA
cacaggtggcgcttccagtg

SEQ ID NO: 9839 - RNA, 20 nt, synthetic construct
  source 1..20: mol_type = other RNA
cacaggtgtgcagctgtctc

SEQ ID NO: 9840 - RNA, 20 nt, synthetic construct
  source 1..20: mol_type = other RNA
cacagttggaggagaatcca

SEQ ID NO: 9841 - RNA, 20 nt, synthetic construct
  source 1..20: mol_type = other RNA
cacatggtacctgttagaca

SEQ ID NO: 9842 - RNA, 20 nt, synthetic construct
  source 1..20: mol_type = other RNA
caccaagtggttgataaacc

SEQ ID NO: 9843 - RNA, 20 nt, synthetic construct
  source 1..20: mol_type = other RNA
caccacagccctgccaggac

SEQ ID NO: 9844 - RNA, 20 nt, synthetic construct
  source 1..20: mol_type = other RNA
caccacccacaggtggcgct

SEQ ID NO: 9845 - RNA, 20 nt, synthetic construct
  source 1..20: mol_type = other RNA
caccagacggccgcgtcaga

SEQ ID NO: 9846 - RNA, 20 nt, synthetic construct
  source 1..20: mol_type = other RNA
caccaggatcagtgaaacgc

SEQ ID NO: 9847 - RNA, 20 nt, synthetic construct
  source 1..20: mol_type = other RNA
caccagggactccagagtcc

SEQ ID NO: 9848 - RNA, 20 nt, synthetic construct
  source 1..20: mol_type = other RNA
caccaggtcgtggccgcctc

SEQ ID NO: 9849 - RNA, 20 nt, synthetic construct
  source 1..20: mol_type = other RNA
caccatctcatgcccctggc

SEQ ID NO: 9850 - RNA, 20 nt, synthetic construct
  source 1..20: mol_type = other RNA
caccattctcacaaagggag

SEQ ID NO: 9851 - RNA, 20 nt, synthetic construct
  source 1..20: mol_type = other RNA
cacccaaaaggcagcctggt

SEQ ID NO: 9852 - RNA, 20 nt, synthetic construct
  source 1..20: mol_type = other RNA
cacccacaggtggcgcttcc

SEQ ID NO: 9853 - RNA, 20 nt, synthetic construct
  source 1..20: mol_type = other RNA
cacccagacctgacccaaac

SEQ ID NO: 9854 - RNA, 20 nt, synthetic construct
  source 1..20: mol_type = other RNA
cacccagagacagtgaccaa

SEQ ID NO: 9855 - RNA, 20 nt, synthetic construct
  source 1..20: mol_type = other RNA
cacccagatgagaagccccc

SEQ ID NO: 9856 - RNA, 20 nt, synthetic construct
  source 1..20: mol_type = other RNA
cacccagtgtccacaaggcc

SEQ ID NO: 9857 - RNA, 20 nt, synthetic construct
  source 1..20: mol_type = other RNA
cacccagttgtcatggcgat

SEQ ID NO: 9858 - RNA, 20 nt, synthetic construct
  source 1..20: mol_type = other RNA
caccccaatgctccaggcct

SEQ ID NO: 9859 - RNA, 20 nt, synthetic construct
  source 1..20: mol_type = other RNA
caccccaattgccttagtgg

SEQ ID NO: 9860 - RNA, 20 nt, synthetic construct
  source 1..20: mol_type = other RNA
caccccacacccagacctga

SEQ ID NO: 9861 - RNA, 20 nt, synthetic construct
  source 1..20: mol_type = other RNA
caccccacagttggaggaga

SEQ ID NO: 9862 - RNA, 20 nt, synthetic construct
  source 1..20: mol_type = other RNA
caccccagcagatactctgc

SEQ ID NO: 9863 - RNA, 20 nt, synthetic construct
  source 1..20: mol_type = other RNA
caccccagccctgtctacca

SEQ ID NO: 9864 - RNA, 20 nt, synthetic construct
  source 1..20: mol_type = other RNA
cacccccctcctcaccacag

SEQ ID NO: 9865 - RNA, 20 nt, synthetic construct
  source 1..20: mol_type = other RNA
cacccctctgggagtcccgc

SEQ ID NO: 9866 - RNA, 20 nt, synthetic construct
  source 1..20: mol_type = other RNA
caccctgcatagccctgggc

SEQ ID NO: 9867 - RNA, 20 nt, synthetic construct
  source 1..20: mol_type = other RNA
caccctgcgctaccctctcc

SEQ ID NO: 9868 - RNA, 20 nt, synthetic construct
  source 1..20: mol_type = other RNA
caccctgtgctgggacagac

SEQ ID NO: 9869 - RNA, 20 nt, synthetic construct
  source 1..20: mol_type = other RNA
caccgtgtccctggatctgt

SEQ ID NO: 9870 - RNA, 20 nt, synthetic construct
  source 1..20: mol_type = other RNA
caccgtttctcattcttccc

SEQ ID NO: 9871 - RNA, 20 nt, synthetic construct
  source 1..20: mol_type = other RNA
cacctacttggcctggaccc

SEQ ID NO: 9872 - RNA, 20 nt, synthetic construct
  source 1..20: mol_type = other RNA
cacctaggacgcaccattct

SEQ ID NO: 9873 - RNA, 20 nt, synthetic construct
  source 1..20: mol_type = other RNA
cacctctccaaagctgccca

SEQ ID NO: 9874 - RNA, 20 nt, synthetic construct
  source 1..20: mol_type = other RNA
cacctggggctgtgtttctc

SEQ ID NO: 9875 - RNA, 20 nt, synthetic construct
  source 1..20: mol_type = other RNA
cacctgtgggtggtgacggg

SEQ ID NO: 9876 - RNA, 20 nt, synthetic construct
  source 1..20: mol_type = other RNA
cacctgtgtgcctgggcccc

SEQ ID NO: 9877 - RNA, 20 nt, synthetic construct
  source 1..20: mol_type = other RNA
cacctttctagtccccaatt

SEQ ID NO: 9878 - RNA, 20 nt, synthetic construct
  source 1..20: mol_type = other RNA
cacgaaaacagatccaggga

SEQ ID NO: 9879 - RNA, 20 nt, synthetic construct
  source 1..20: mol_type = other RNA
cacgaaaggactcctggcta

SEQ ID NO: 9880 - RNA, 20 nt, synthetic construct
  source 1..20: mol_type = other RNA
cacgacctggtgaacaccta

SEQ ID NO: 9881 - RNA, 20 nt, synthetic construct
  source 1..20: mol_type = other RNA
cacgagaggccaccccagcc

SEQ ID NO: 9882 - RNA, 20 nt, synthetic construct
  source 1..20: mol_type = other RNA
cacgagtccaggccccagcc

SEQ ID NO: 9883 - RNA, 20 nt, synthetic construct
  source 1..20: mol_type = other RNA
cacggacacccccctcctca

SEQ ID NO: 9884 - RNA, 20 nt, synthetic construct
  source 1..20: mol_type = other RNA
cacggaggaacaatataaat

SEQ ID NO: 9885 - RNA, 20 nt, synthetic construct
  source 1..20: mol_type = other RNA
cacggcaaaacccccgtcac

SEQ ID NO: 9886 - RNA, 20 nt, synthetic construct
  source 1..20: mol_type = other RNA
cacggcttcgttcctgcaga

SEQ ID NO: 9887 - RNA, 20 nt, synthetic construct
  source 1..20: mol_type = other RNA
cacgggataaattacccccc

SEQ ID NO: 9888 - RNA, 20 nt, synthetic construct
  source 1..20: mol_type = other RNA
cacgggccaccgtttctcat

SEQ ID NO: 9889 - RNA, 20 nt, synthetic construct
  source 1..20: mol_type = other RNA
cacggggccctgcagccagg

SEQ ID NO: 9890 - RNA, 20 nt, synthetic construct
  source 1..20: mol_type = other RNA
cacggtgctaggacagtggg

SEQ ID NO: 9891 - RNA, 20 nt, synthetic construct
  source 1..20: mol_type = other RNA
cacggtgtcccagcaagtcg

SEQ ID NO: 9892 - RNA, 20 nt, synthetic construct
  source 1..20: mol_type = other RNA
cacgtaacctgagaagggaa

SEQ ID NO: 9893 - RNA, 20 nt, synthetic construct
  source 1..20: mol_type = other RNA
cacgtgccctgggaacggga

SEQ ID NO: 9894 - RNA, 20 nt, synthetic construct
  source 1..20: mol_type = other RNA
cacgtgcggccccttcacag

SEQ ID NO: 9895 - RNA, 20 nt, synthetic construct
  source 1..20: mol_type = other RNA
cacgtggggtaccctaagaa

SEQ ID NO: 9896 - RNA, 20 nt, synthetic construct
  source 1..20: mol_type = other RNA
cacgtgggtttatcaaccac

SEQ ID NO: 9897 - RNA, 20 nt, synthetic construct
  source 1..20: mol_type = other RNA
cactaaggcaattggggtgc

SEQ ID NO: 9898 - RNA, 20 nt, synthetic construct
  source 1..20: mol_type = other RNA
cactccagttcactgaggcc

SEQ ID NO: 9899 - RNA, 20 nt, synthetic construct
  source 1..20: mol_type = other RNA
cactccttcctcagctccag

SEQ ID NO: 9900 - RNA, 20 nt, synthetic construct
  source 1..20: mol_type = other RNA
cactcttcggggtatcccag

SEQ ID NO: 9901 - RNA, 20 nt, synthetic construct
  source 1..20: mol_type = other RNA
cactgaaaccctcagtccta

SEQ ID NO: 9902 - RNA, 20 nt, synthetic construct
  source 1..20: mol_type = other RNA
cactgaaggcctggccggcc

SEQ ID NO: 9903 - RNA, 20 nt, synthetic construct
  source 1..20: mol_type = other RNA
cactgagaaccgggcaggtc

SEQ ID NO: 9904 - RNA, 20 nt, synthetic construct
  source 1..20: mol_type = other RNA
cactgagcactgaaggcctg

SEQ ID NO: 9905 - RNA, 20 nt, synthetic construct
  source 1..20: mol_type = other RNA
cactgaggccccctctgcac

SEQ ID NO: 9906 - RNA, 20 nt, synthetic construct
  source 1..20: mol_type = other RNA
cactgatcctggtgctgcag

SEQ ID NO: 9907 - RNA, 20 nt, synthetic construct
  source 1..20: mol_type = other RNA
cactggaagcgccacctgtg

SEQ ID NO: 9908 - RNA, 20 nt, synthetic construct
  source 1..20: mol_type = other RNA
cactggctgtttaagatacg

SEQ ID NO: 9909 - RNA, 20 nt, synthetic construct
  source 1..20: mol_type = other RNA
cactgggcaaccaggcgtat

SEQ ID NO: 9910 - RNA, 20 nt, synthetic construct
  source 1..20: mol_type = other RNA
cactggggactctttaagga

SEQ ID NO: 9911 - RNA, 20 nt, synthetic construct
  source 1..20: mol_type = other RNA
cactgggtgggctccgggac

SEQ ID NO: 9912 - RNA, 20 nt, synthetic construct
  source 1..20: mol_type = other RNA
cactgtcctagcaccgtgtc

SEQ ID NO: 9913 - RNA, 20 nt, synthetic construct
  source 1..20: mol_type = other RNA
cactgtctctgggtgactct

SEQ ID NO: 9914 - RNA, 20 nt, synthetic construct
  source 1..20: mol_type = other RNA
cacttcccaagaggagaagc

SEQ ID NO: 9915 - RNA, 20 nt, synthetic construct
  source 1..20: mol_type = other RNA
cacttcctgtttgcagatag

SEQ ID NO: 9916 - RNA, 20 nt, synthetic construct
  source 1..20: mol_type = other RNA
cacttggtgaggctggtacc

SEQ ID NO: 9917 - RNA, 20 nt, synthetic construct
  source 1..20: mol_type = other RNA
cagaacctgagctgctctga

SEQ ID NO: 9918 - RNA, 20 nt, synthetic construct
  source 1..20: mol_type = other RNA
cagaagcccagagcagggcc

SEQ ID NO: 9919 - RNA, 20 nt, synthetic construct
  source 1..20: mol_type = other RNA
cagaataagttggtcctgag

SEQ ID NO: 9920 - RNA, 20 nt, synthetic construct
  source 1..20: mol_type = other RNA
cagacccacgagtccaggcc

SEQ ID NO: 9921 - RNA, 20 nt, synthetic construct
  source 1..20: mol_type = other RNA
cagacccaggggtccaggcc

SEQ ID NO: 9922 - RNA, 20 nt, synthetic construct
  source 1..20: mol_type = other RNA
cagacctgacccaaacccag

SEQ ID NO: 9923 - RNA, 20 nt, synthetic construct
  source 1..20: mol_type = other RNA
cagacggccgcgtcagagca

SEQ ID NO: 9924 - RNA, 20 nt, synthetic construct
  source 1..20: mol_type = other RNA
cagactagggaagaggttcc

SEQ ID NO: 9925 - RNA, 20 nt, synthetic construct
  source 1..20: mol_type = other RNA
cagactcaggggcctgggcg

SEQ ID NO: 9926 - RNA, 20 nt, synthetic construct
  source 1..20: mol_type = other RNA
cagactgagccccgttcccc

SEQ ID NO: 9927 - RNA, 20 nt, synthetic construct
  source 1..20: mol_type = other RNA
cagagaagagctgggggcct

SEQ ID NO: 9928 - RNA, 20 nt, synthetic construct
  source 1..20: mol_type = other RNA
cagagacagtgaccaaccat

SEQ ID NO: 9929 - RNA, 20 nt, synthetic construct
  source 1..20: mol_type = other RNA
cagagaggagggattccctt

SEQ ID NO: 9930 - RNA, 20 nt, synthetic construct
  source 1..20: mol_type = other RNA
cagagcagctcaggttctgg

SEQ ID NO: 9931 - RNA, 20 nt, synthetic construct
  source 1..20: mol_type = other RNA
cagagcagggccttagggaa

SEQ ID NO: 9932 - RNA, 20 nt, synthetic construct
  source 1..20: mol_type = other RNA
cagagcagggtcccgcttcc

SEQ ID NO: 9933 - RNA, 20 nt, synthetic construct
  source 1..20: mol_type = other RNA
cagagccaggaacccctgta

SEQ ID NO: 9934 - RNA, 20 nt, synthetic construct
  source 1..20: mol_type = other RNA
cagagccaggagtcctggcc

SEQ ID NO: 9935 - RNA, 20 nt, synthetic construct
  source 1..20: mol_type = other RNA
cagaggccccaggccaccta

SEQ ID NO: 9936 - RNA, 20 nt, synthetic construct
  source 1..20: mol_type = other RNA
cagaggctgttgggtcattt

SEQ ID NO: 9937 - RNA, 20 nt, synthetic construct
  source 1..20: mol_type = other RNA
cagagggagccacgaaaaca

SEQ ID NO: 9938 - RNA, 20 nt, synthetic construct
  source 1..20: mol_type = other RNA
cagagggggcctcagtgaac

SEQ ID NO: 9939 - RNA, 20 nt, synthetic construct
  source 1..20: mol_type = other RNA
cagaggggtgagacagctgc

SEQ ID NO: 9940 - RNA, 20 nt, synthetic construct
  source 1..20: mol_type = other RNA
cagagtatctgctggggtgg

SEQ ID NO: 9941 - RNA, 20 nt, synthetic construct
  source 1..20: mol_type = other RNA
cagagtccaggcccaacccc

SEQ ID NO: 9942 - RNA, 20 nt, synthetic construct
  source 1..20: mol_type = other RNA
cagatactctgcaggaacga

SEQ ID NO: 9943 - RNA, 20 nt, synthetic construct
  source 1..20: mol_type = other RNA
cagatagcactggggactct

SEQ ID NO: 9944 - RNA, 20 nt, synthetic construct
  source 1..20: mol_type = other RNA
cagatagccaggagtccttt

SEQ ID NO: 9945 - RNA, 20 nt, synthetic construct
  source 1..20: mol_type = other RNA
cagatccagggacacggtgc

SEQ ID NO: 9946 - RNA, 20 nt, synthetic construct
  source 1..20: mol_type = other RNA
cagatgaaggagtccaggcc

SEQ ID NO: 9947 - RNA, 20 nt, synthetic construct
  source 1..20: mol_type = other RNA
cagatgagaagccccctccc

SEQ ID NO: 9948 - RNA, 20 nt, synthetic construct
  source 1..20: mol_type = other RNA
cagatgggcagctttggaga

SEQ ID NO: 9949 - RNA, 20 nt, synthetic construct
  source 1..20: mol_type = other RNA
cagcaagtcgggactccaga

SEQ ID NO: 9950 - RNA, 20 nt, synthetic construct
  source 1..20: mol_type = other RNA
cagcacagggtggccttcct

SEQ ID NO: 9951 - RNA, 20 nt, synthetic construct
  source 1..20: mol_type = other RNA
cagcaccaggatcagtgaaa

SEQ ID NO: 9952 - RNA, 20 nt, synthetic construct
  source 1..20: mol_type = other RNA
cagcagatactctgcaggaa

SEQ ID NO: 9953 - RNA, 20 nt, synthetic construct
  source 1..20: mol_type = other RNA
cagcaggggggcgatgcttg

SEQ ID NO: 9954 - RNA, 20 nt, synthetic construct
  source 1..20: mol_type = other RNA
cagcataagctggtcacccc

SEQ ID NO: 9955 - RNA, 20 nt, synthetic construct
  source 1..20: mol_type = other RNA
cagccacagcaggggggcga

SEQ ID NO: 9956 - RNA, 20 nt, synthetic construct
  source 1..20: mol_type = other RNA
cagccacggtgtcccagcaa

SEQ ID NO: 9957 - RNA, 20 nt, synthetic construct
  source 1..20: mol_type = other RNA
cagccaggggctgacacggg

SEQ ID NO: 9958 - RNA, 20 nt, synthetic construct
  source 1..20: mol_type = other RNA
cagccaggtccttccaaggg

SEQ ID NO: 9959 - RNA, 20 nt, synthetic construct
  source 1..20: mol_type = other RNA
cagccagtggccagaggctg

SEQ ID NO: 9960 - RNA, 20 nt, synthetic construct
  source 1..20: mol_type = other RNA
cagcccaccccaatgctcca

SEQ ID NO: 9961 - RNA, 20 nt, synthetic construct
  source 1..20: mol_type = other RNA
cagccccaggtggagaaact

SEQ ID NO: 9962 - RNA, 20 nt, synthetic construct
  source 1..20: mol_type = other RNA
cagccccgcctccctaagac

SEQ ID NO: 9963 - RNA, 20 nt, synthetic construct
  source 1..20: mol_type = other RNA
cagccccgtcctggcagggc

SEQ ID NO: 9964 - RNA, 20 nt, synthetic construct
  source 1..20: mol_type = other RNA
cagcccctcctactctagcc

SEQ ID NO: 9965 - RNA, 20 nt, synthetic construct
  source 1..20: mol_type = other RNA
cagcccctcctccctcagac

SEQ ID NO: 9966 - RNA, 20 nt, synthetic construct
  source 1..20: mol_type = other RNA
cagcccctcctccttcagag

SEQ ID NO: 9967 - RNA, 20 nt, synthetic construct
  source 1..20: mol_type = other RNA
cagcccctcctctctcaaac

SEQ ID NO: 9968 - RNA, 20 nt, synthetic construct
  source 1..20: mol_type = other RNA
cagcccctcctgccttaaac

SEQ ID NO: 9969 - RNA, 20 nt, synthetic construct
  source 1..20: mol_type = other RNA
cagcccctggctgcagggcc

SEQ ID NO: 9970 - RNA, 20 nt, synthetic construct
  source 1..20: mol_type = other RNA
cagcccgagtttccatgacc

SEQ ID NO: 9971 - RNA, 20 nt, synthetic construct
  source 1..20: mol_type = other RNA
cagccctaagaatcctggct

SEQ ID NO: 9972 - RNA, 20 nt, synthetic construct
  source 1..20: mol_type = other RNA
cagccctgccaggacggggc

SEQ ID NO: 9973 - RNA, 20 nt, synthetic construct
  source 1..20: mol_type = other RNA
cagccctgtctaccaggctg

SEQ ID NO: 9974 - RNA, 20 nt, synthetic construct
  source 1..20: mol_type = other RNA
cagcccttccgccctcagat

SEQ ID NO: 9975 - RNA, 20 nt, synthetic construct
  source 1..20: mol_type = other RNA
cagcctagttttagcactga

SEQ ID NO: 9976 - RNA, 20 nt, synthetic construct
  source 1..20: mol_type = other RNA
cagcctcaccaagtggttga

SEQ ID NO: 9977 - RNA, 20 nt, synthetic construct
  source 1..20: mol_type = other RNA
cagcctctccccattcagac

SEQ ID NO: 9978 - RNA, 20 nt, synthetic construct
  source 1..20: mol_type = other RNA
cagcctctggccactggctg

SEQ ID NO: 9979 - RNA, 20 nt, synthetic construct
  source 1..20: mol_type = other RNA
cagcctggggcccaggcaca

SEQ ID NO: 9980 - RNA, 20 nt, synthetic construct
  source 1..20: mol_type = other RNA
cagcctggtagacagggctg

SEQ ID NO: 9981 - RNA, 20 nt, synthetic construct
  source 1..20: mol_type = other RNA
cagctcaggttctgggagag

SEQ ID NO: 9982 - RNA, 20 nt, synthetic construct
  source 1..20: mol_type = other RNA
cagctccagttcaggtcccg

SEQ ID NO: 9983 - RNA, 20 nt, synthetic construct
  source 1..20: mol_type = other RNA
cagctcccctgcttcttggc

SEQ ID NO: 9984 - RNA, 20 nt, synthetic construct
  source 1..20: mol_type = other RNA
cagctcttctctgttcagcc

SEQ ID NO: 9985 - RNA, 20 nt, synthetic construct
  source 1..20: mol_type = other RNA
cagctgcacacctgtgtgcc

SEQ ID NO: 9986 - RNA, 20 nt, synthetic construct
  source 1..20: mol_type = other RNA
cagctgtctcacccctctgg

SEQ ID NO: 9987 - RNA, 20 nt, synthetic construct
  source 1..20: mol_type = other RNA
cagcttatgctgtttgccca

SEQ ID NO: 9988 - RNA, 20 nt, synthetic construct
  source 1..20: mol_type = other RNA
cagcttccttacacttccca

SEQ ID NO: 9989 - RNA, 20 nt, synthetic construct
  source 1..20: mol_type = other RNA
cagctttggagaggtgaggg

SEQ ID NO: 9990 - RNA, 20 nt, synthetic construct
  source 1..20: mol_type = other RNA
caggaacccctgtagggaag

SEQ ID NO: 9991 - RNA, 20 nt, synthetic construct
  source 1..20: mol_type = other RNA
caggaacgaagccgtgggcc

SEQ ID NO: 9992 - RNA, 20 nt, synthetic construct
  source 1..20: mol_type = other RNA
caggaagtgaacggggaagg

SEQ ID NO: 9993 - RNA, 20 nt, synthetic construct
  source 1..20: mol_type = other RNA
caggaatgggggcagggtac

SEQ ID NO: 9994 - RNA, 20 nt, synthetic construct
  source 1..20: mol_type = other RNA
caggacagcctagttttagc

SEQ ID NO: 9995 - RNA, 20 nt, synthetic construct
  source 1..20: mol_type = other RNA
caggaccaacttattctgat

SEQ ID NO: 9996 - RNA, 20 nt, synthetic construct
  source 1..20: mol_type = other RNA
caggacgagaaacacagccc

SEQ ID NO: 9997 - RNA, 20 nt, synthetic construct
  source 1..20: mol_type = other RNA
caggacggggctggctactg

SEQ ID NO: 9998 - RNA, 20 nt, synthetic construct
  source 1..20: mol_type = other RNA
caggactcctggctctgaag

SEQ ID NO: 9999 - RNA, 20 nt, synthetic construct
  source 1..20: mol_type = other RNA
caggagagccaggggcatga

SEQ ID NO: 10000 - RNA, 20 nt, synthetic construct
  source 1..20: mol_type = other RNA
caggagaggcgctcaggctt

SEQ ID NO: 10001 - RNA, 20 nt, synthetic construct
  source 1..20: mol_type = other RNA
caggagcccaggcccccagc

SEQ ID NO: 10002 - RNA, 20 nt, synthetic construct
  source 1..20: mol_type = other RNA
caggaggccaggccccagcc

SEQ ID NO: 10003 - RNA, 20 nt, synthetic construct
  source 1..20: mol_type = other RNA
caggaggcctggagcattgg

SEQ ID NO: 10004 - RNA, 20 nt, synthetic construct
  source 1..20: mol_type = other RNA
caggaggggctgggggccag

SEQ ID NO: 10005 - RNA, 20 nt, synthetic construct
  source 1..20: mol_type = other RNA
caggagtccaggcccccagt

SEQ ID NO: 10006 - RNA, 20 nt, synthetic construct
  source 1..20: mol_type = other RNA
caggagtcctggcccccagc

SEQ ID NO: 10007 - RNA, 20 nt, synthetic construct
  source 1..20: mol_type = other RNA
caggagtcctttcgtggttt

SEQ ID NO: 10008 - RNA, 20 nt, synthetic construct
  source 1..20: mol_type = other RNA
caggatcagtgaaacgcacc

SEQ ID NO: 10009 - RNA, 20 nt, synthetic construct
  source 1..20: mol_type = other RNA
caggattcttagggctgaac

SEQ ID NO: 10010 - RNA, 20 nt, synthetic construct
  source 1..20: mol_type = other RNA
caggcacacaggtgtgcagc

SEQ ID NO: 10011 - RNA, 20 nt, synthetic construct
  source 1..20: mol_type = other RNA
caggcaggtccccaagcatc

SEQ ID NO: 10012 - RNA, 20 nt, synthetic construct
  source 1..20: mol_type = other RNA
caggcatccctgtgaaagat

SEQ ID NO: 10013 - RNA, 20 nt, synthetic construct
  source 1..20: mol_type = other RNA
caggcatctttcacagggat

SEQ ID NO: 10014 - RNA, 20 nt, synthetic construct
  source 1..20: mol_type = other RNA
caggccaagtaggtggcctg

SEQ ID NO: 10015 - RNA, 20 nt, synthetic construct
  source 1..20: mol_type = other RNA
caggccacctacttggcctg

SEQ ID NO: 10016 - RNA, 20 nt, synthetic construct
  source 1..20: mol_type = other RNA
caggcccaacccctccccat

SEQ ID NO: 10017 - RNA, 20 nt, synthetic construct
  source 1..20: mol_type = other RNA
caggcccagccccgcctccc

SEQ ID NO: 10018 - RNA, 20 nt, synthetic construct
  source 1..20: mol_type = other RNA
caggccccagcccctcctct

SEQ ID NO: 10019 - RNA, 20 nt, synthetic construct
  source 1..20: mol_type = other RNA
caggccccagcccttccgcc

SEQ ID NO: 10020 - RNA, 20 nt, synthetic construct
  source 1..20: mol_type = other RNA
caggcccccagcctctcccc

SEQ ID NO: 10021 - RNA, 20 nt, synthetic construct
  source 1..20: mol_type = other RNA
caggcccccagctcttctct

SEQ ID NO: 10022 - RNA, 20 nt, synthetic construct
  source 1..20: mol_type = other RNA
caggcccccagtccctccac

SEQ ID NO: 10023 - RNA, 20 nt, synthetic construct
  source 1..20: mol_type = other RNA
caggcccctgagtctgtccc

SEQ ID NO: 10024 - RNA, 20 nt, synthetic construct
  source 1..20: mol_type = other RNA
caggccggccaggccttcag

SEQ ID NO: 10025 - RNA, 20 nt, synthetic construct
  source 1..20: mol_type = other RNA
caggcctcaggcatctttca

SEQ ID NO: 10026 - RNA, 20 nt, synthetic construct
  source 1..20: mol_type = other RNA
caggcctcctgggatacccc

SEQ ID NO: 10027 - RNA, 20 nt, synthetic construct
  source 1..20: mol_type = other RNA
caggccttcagtgctcagtg

SEQ ID NO: 10028 - RNA, 20 nt, synthetic construct
  source 1..20: mol_type = other RNA
caggccttgtggacactggg

SEQ ID NO: 10029 - RNA, 20 nt, synthetic construct
  source 1..20: mol_type = other RNA
caggcgtatcttaaacagcc

SEQ ID NO: 10030 - RNA, 20 nt, synthetic construct
  source 1..20: mol_type = other RNA
caggctgccttttgggtgga

SEQ ID NO: 10031 - RNA, 20 nt, synthetic construct
  source 1..20: mol_type = other RNA
caggctgtcacactccagtt

SEQ ID NO: 10032 - RNA, 20 nt, synthetic construct
  source 1..20: mol_type = other RNA
caggcttccctgtccccctt

SEQ ID NO: 10033 - RNA, 20 nt, synthetic construct
  source 1..20: mol_type = other RNA
cagggaagcctgagcgcctc

SEQ ID NO: 10034 - RNA, 20 nt, synthetic construct
  source 1..20: mol_type = other RNA
cagggacacggtgctaggac

SEQ ID NO: 10035 - RNA, 20 nt, synthetic construct
  source 1..20: mol_type = other RNA
cagggactccagagtccagg

SEQ ID NO: 10036 - RNA, 20 nt, synthetic construct
  source 1..20: mol_type = other RNA
cagggatgcctgtactgggc

SEQ ID NO: 10037 - RNA, 20 nt, synthetic construct
  source 1..20: mol_type = other RNA
cagggatggttggtcactgt

SEQ ID NO: 10038 - RNA, 20 nt, synthetic construct
  source 1..20: mol_type = other RNA
cagggcacgtgcggcccctt

SEQ ID NO: 10039 - RNA, 20 nt, synthetic construct
  source 1..20: mol_type = other RNA
cagggccccgtgcagagggg

SEQ ID NO: 10040 - RNA, 20 nt, synthetic construct
  source 1..20: mol_type = other RNA
cagggccttagggaagcggg

SEQ ID NO: 10041 - RNA, 20 nt, synthetic construct
  source 1..20: mol_type = other RNA
cagggctatgcagggtggag

SEQ ID NO: 10042 - RNA, 20 nt, synthetic construct
  source 1..20: mol_type = other RNA
cagggctggggtggcctctc

SEQ ID NO: 10043 - RNA, 20 nt, synthetic construct
  source 1..20: mol_type = other RNA
cagggctgtggtgaggaggg

SEQ ID NO: 10044 - RNA, 20 nt, synthetic construct
  source 1..20: mol_type = other RNA
caggggaacggggatgcagg

SEQ ID NO: 10045 - RNA, 20 nt, synthetic construct
  source 1..20: mol_type = other RNA
caggggaacggggctcagtc

SEQ ID NO: 10046 - RNA, 20 nt, synthetic construct
  source 1..20: mol_type = other RNA
caggggaagggggatgcagg

SEQ ID NO: 10047 - RNA, 20 nt, synthetic construct
  source 1..20: mol_type = other RNA
caggggagctgggtttgggt

SEQ ID NO: 10048 - RNA, 20 nt, synthetic construct
  source 1..20: mol_type = other RNA
caggggcatgagatggtgga

SEQ ID NO: 10049 - RNA, 20 nt, synthetic construct
  source 1..20: mol_type = other RNA
caggggcctgggcgggactc

SEQ ID NO: 10050 - RNA, 20 nt, synthetic construct
  source 1..20: mol_type = other RNA
caggggctgacacgggccac

SEQ ID NO: 10051 - RNA, 20 nt, synthetic construct
  source 1..20: mol_type = other RNA
caggggggcgatgcttgggg

SEQ ID NO: 10052 - RNA, 20 nt, synthetic construct
  source 1..20: mol_type = other RNA
cagggggtcggaggagggac

SEQ ID NO: 10053 - RNA, 20 nt, synthetic construct
  source 1..20: mol_type = other RNA
caggggttcctggctctgct

SEQ ID NO: 10054 - RNA, 20 nt, synthetic construct
  source 1..20: mol_type = other RNA
cagggtaccagcctcaccaa

SEQ ID NO: 10055 - RNA, 20 nt, synthetic construct
  source 1..20: mol_type = other RNA
cagggtcccgcttccctaag

SEQ ID NO: 10056 - RNA, 20 nt, synthetic construct
  source 1..20: mol_type = other RNA
cagggtggaggaaggccacc

SEQ ID NO: 10057 - RNA, 20 nt, synthetic construct
  source 1..20: mol_type = other RNA
cagggtggccactgagaacc

SEQ ID NO: 10058 - RNA, 20 nt, synthetic construct
  source 1..20: mol_type = other RNA
cagggtggccttcctccacc

SEQ ID NO: 10059 - RNA, 20 nt, synthetic construct
  source 1..20: mol_type = other RNA
caggtaaaactgacgcacgg

SEQ ID NO: 10060 - RNA, 20 nt, synthetic construct
  source 1..20: mol_type = other RNA
caggtaccatgtggggttcc

SEQ ID NO: 10061 - RNA, 20 nt, synthetic construct
  source 1..20: mol_type = other RNA
caggtccccaagcatcgccc

SEQ ID NO: 10062 - RNA, 20 nt, synthetic construct
  source 1..20: mol_type = other RNA
caggtcccggagcccaccca

SEQ ID NO: 10063 - RNA, 20 nt, synthetic construct
  source 1..20: mol_type = other RNA
caggtccttccaagggtcaa

SEQ ID NO: 10064 - RNA, 20 nt, synthetic construct
  source 1..20: mol_type = other RNA
caggtccttgaaagggaaag

SEQ ID NO: 10065 - RNA, 20 nt, synthetic construct
  source 1..20: mol_type = other RNA
caggtcgtggccgcctctac

SEQ ID NO: 10066 - RNA, 20 nt, synthetic construct
  source 1..20: mol_type = other RNA
caggtctgggtgtggggtga

SEQ ID NO: 10067 - RNA, 20 nt, synthetic construct
  source 1..20: mol_type = other RNA
caggtggagaaactggccgg

SEQ ID NO: 10068 - RNA, 20 nt, synthetic construct
  source 1..20: mol_type = other RNA
caggtggcgcttccagtgct

SEQ ID NO: 10069 - RNA, 20 nt, synthetic construct
  source 1..20: mol_type = other RNA
caggtgtgcagctgtctcac

SEQ ID NO: 10070 - RNA, 20 nt, synthetic construct
  source 1..20: mol_type = other RNA
caggttacgtggccaagaag

SEQ ID NO: 10071 - RNA, 20 nt, synthetic construct
  source 1..20: mol_type = other RNA
caggttctgggagagggtag

SEQ ID NO: 10072 - RNA, 20 nt, synthetic construct
  source 1..20: mol_type = other RNA
cagtacaggcatccctgtga

SEQ ID NO: 10073 - RNA, 20 nt, synthetic construct
  source 1..20: mol_type = other RNA
cagtagccagccccgtcctg

SEQ ID NO: 10074 - RNA, 20 nt, synthetic construct
  source 1..20: mol_type = other RNA
cagtcaccccacagttggag

SEQ ID NO: 10075 - RNA, 20 nt, synthetic construct
  source 1..20: mol_type = other RNA
cagtccctccaccctcagac

SEQ ID NO: 10076 - RNA, 20 nt, synthetic construct
  source 1..20: mol_type = other RNA
cagtcctaggaaaacaggga

SEQ ID NO: 10077 - RNA, 20 nt, synthetic construct
  source 1..20: mol_type = other RNA
cagtctgaagagcagagcca

SEQ ID NO: 10078 - RNA, 20 nt, synthetic construct
  source 1..20: mol_type = other RNA
cagtgaaacgcaccagacgg

SEQ ID NO: 10079 - RNA, 20 nt, synthetic construct
  source 1..20: mol_type = other RNA
cagtgaactggagtgtgaca

SEQ ID NO: 10080 - RNA, 20 nt, synthetic construct
  source 1..20: mol_type = other RNA
cagtgaccaaccatccctgt

SEQ ID NO: 10081 - RNA, 20 nt, synthetic construct
  source 1..20: mol_type = other RNA
cagtgctaaaactaggctgt

SEQ ID NO: 10082 - RNA, 20 nt, synthetic construct
  source 1..20: mol_type = other RNA
cagtgctatctgggacatat

SEQ ID NO: 10083 - RNA, 20 nt, synthetic construct
  source 1..20: mol_type = other RNA
cagtgctcagactagggaag

SEQ ID NO: 10084 - RNA, 20 nt, synthetic construct
  source 1..20: mol_type = other RNA
cagtgctcagtggaaaccac

SEQ ID NO: 10085 - RNA, 20 nt, synthetic construct
  source 1..20: mol_type = other RNA
cagtggaaaccacgaaagga

SEQ ID NO: 10086 - RNA, 20 nt, synthetic construct
  source 1..20: mol_type = other RNA
cagtggccaccctgcgctac

SEQ ID NO: 10087 - RNA, 20 nt, synthetic construct
  source 1..20: mol_type = other RNA
cagtggccagaggctgttgg

SEQ ID NO: 10088 - RNA, 20 nt, synthetic construct
  source 1..20: mol_type = other RNA
cagtggggaaaatgacccaa

SEQ ID NO: 10089 - RNA, 20 nt, synthetic construct
  source 1..20: mol_type = other RNA
cagtggtcaggccggccagg

SEQ ID NO: 10090 - RNA, 20 nt, synthetic construct
  source 1..20: mol_type = other RNA
cagtgtccacaaggcctggg

SEQ ID NO: 10091 - RNA, 20 nt, synthetic construct
  source 1..20: mol_type = other RNA
cagttcactgaggccccctc

SEQ ID NO: 10092 - RNA, 20 nt, synthetic construct
  source 1..20: mol_type = other RNA
cagttcaggtcccggagccc

SEQ ID NO: 10093 - RNA, 20 nt, synthetic construct
  source 1..20: mol_type = other RNA
cagttggaggagaatccacc

SEQ ID NO: 10094 - RNA, 20 nt, synthetic construct
  source 1..20: mol_type = other RNA
cagttgtcatggcgataggg

SEQ ID NO: 10095 - RNA, 20 nt, synthetic construct
  source 1..20: mol_type = other RNA
cagtttctccacctggggct

SEQ ID NO: 10096 - RNA, 20 nt, synthetic construct
  source 1..20: mol_type = other RNA
cagtttggaaaaacaaaatc

SEQ ID NO: 10097 - RNA, 20 nt, synthetic construct
  source 1..20: mol_type = other RNA
cagttttacctgtgagataa

SEQ ID NO: 10098 - RNA, 20 nt, synthetic construct
  source 1..20: mol_type = other RNA
cataagctggtcaccccaca

SEQ ID NO: 10099 - RNA, 20 nt, synthetic construct
  source 1..20: mol_type = other RNA
catagccctgggcccacggc

SEQ ID NO: 10100 - RNA, 20 nt, synthetic construct
  source 1..20: mol_type = other RNA
catattcctccgcccagagc

SEQ ID NO: 10101 - RNA, 20 nt, synthetic construct
  source 1..20: mol_type = other RNA
catcccccagaggccccagg

SEQ ID NO: 10102 - RNA, 20 nt, synthetic construct
  source 1..20: mol_type = other RNA
catcccccttcccctgcatc

SEQ ID NO: 10103 - RNA, 20 nt, synthetic construct
  source 1..20: mol_type = other RNA
catccccgttcccctgcatc

SEQ ID NO: 10104 - RNA, 20 nt, synthetic construct
  source 1..20: mol_type = other RNA
catcccgttcccagggcacg

SEQ ID NO: 10105 - RNA, 20 nt, synthetic construct
  source 1..20: mol_type = other RNA
catccctgtgaaagatgcct

SEQ ID NO: 10106 - RNA, 20 nt, synthetic construct
  source 1..20: mol_type = other RNA
catccctgttttcctaggac

SEQ ID NO: 10107 - RNA, 20 nt, synthetic construct
  source 1..20: mol_type = other RNA
catccttctccaggcaggtc

SEQ ID NO: 10108 - RNA, 20 nt, synthetic construct
  source 1..20: mol_type = other RNA
catccttctttccttaaaga

SEQ ID NO: 10109 - RNA, 20 nt, synthetic construct
  source 1..20: mol_type = other RNA
catcgcccccctgctgtggc

SEQ ID NO: 10110 - RNA, 20 nt, synthetic construct
  source 1..20: mol_type = other RNA
catctcatgcccctggctct

SEQ ID NO: 10111 - RNA, 20 nt, synthetic construct
  source 1..20: mol_type = other RNA
catctgagggcggaagggct

SEQ ID NO: 10112 - RNA, 20 nt, synthetic construct
  source 1..20: mol_type = other RNA
catctggaggaggcgggagg

SEQ ID NO: 10113 - RNA, 20 nt, synthetic construct
  source 1..20: mol_type = other RNA
catctgggtgcgggaacccc

SEQ ID NO: 10114 - RNA, 20 nt, synthetic construct
  source 1..20: mol_type = other RNA
catctttcacagggatgcct

SEQ ID NO: 10115 - RNA, 20 nt, synthetic construct
  source 1..20: mol_type = other RNA
catgacaactgggtggaaat

SEQ ID NO: 10116 - RNA, 20 nt, synthetic construct
  source 1..20: mol_type = other RNA
catgacctcatgctcttggc

SEQ ID NO: 10117 - RNA, 20 nt, synthetic construct
  source 1..20: mol_type = other RNA
catgagatggtggacgagga

SEQ ID NO: 10118 - RNA, 20 nt, synthetic construct
  source 1..20: mol_type = other RNA
catgaggtcatggaaactcg

SEQ ID NO: 10119 - RNA, 20 nt, synthetic construct
  source 1..20: mol_type = other RNA
catgcccctggctctcctgc

SEQ ID NO: 10120 - RNA, 20 nt, synthetic construct
  source 1..20: mol_type = other RNA
catgctcttggccctcgtag

SEQ ID NO: 10121 - RNA, 20 nt, synthetic construct
  source 1..20: mol_type = other RNA
catggaaactcgggctgtga

SEQ ID NO: 10122 - RNA, 20 nt, synthetic construct
  source 1..20: mol_type = other RNA
catggcgataggggaggggg

SEQ ID NO: 10123 - RNA, 20 nt, synthetic construct
  source 1..20: mol_type = other RNA
catggtacctgttagacacg

SEQ ID NO: 10124 - RNA, 20 nt, synthetic construct
  source 1..20: mol_type = other RNA
catgtggggttcccgcaccc

SEQ ID NO: 10125 - RNA, 20 nt, synthetic construct
  source 1..20: mol_type = other RNA
cattcaacccaggaggccag

SEQ ID NO: 10126 - RNA, 20 nt, synthetic construct
  source 1..20: mol_type = other RNA
cattcagacccaggggtcca

SEQ ID NO: 10127 - RNA, 20 nt, synthetic construct
  source 1..20: mol_type = other RNA
cattcctgcaccccaattgc

SEQ ID NO: 10128 - RNA, 20 nt, synthetic construct
  source 1..20: mol_type = other RNA
cattctcacaaagggagttt

SEQ ID NO: 10129 - RNA, 20 nt, synthetic construct
  source 1..20: mol_type = other RNA
cattcttcccttaggggtcc

SEQ ID NO: 10130 - RNA, 20 nt, synthetic construct
  source 1..20: mol_type = other RNA
cattgctctccttgcccccc

SEQ ID NO: 10131 - RNA, 20 nt, synthetic construct
  source 1..20: mol_type = other RNA
cattggggtgggctggggtt

SEQ ID NO: 10132 - RNA, 20 nt, synthetic construct
  source 1..20: mol_type = other RNA
cattttccccactgtcctag

SEQ ID NO: 10133 - RNA, 20 nt, synthetic construct
  source 1..20: mol_type = other RNA
ccaaaacttggggggacaaa

SEQ ID NO: 10134 - RNA, 20 nt, synthetic construct
  source 1..20: mol_type = other RNA
ccaaaaggcagcctggtaga

SEQ ID NO: 10135 - RNA, 20 nt, synthetic construct
  source 1..20: mol_type = other RNA
ccaaacccagctcccctgct

SEQ ID NO: 10136 - RNA, 20 nt, synthetic construct
  source 1..20: mol_type = other RNA
ccaaactgcttctcctcttg

SEQ ID NO: 10137 - RNA, 20 nt, synthetic construct
  source 1..20: mol_type = other RNA
ccaaagctgcccatctggag

SEQ ID NO: 10138 - RNA, 20 nt, synthetic construct
  source 1..20: mol_type = other RNA
ccaaagttagaactcaggac

SEQ ID NO: 10139 - RNA, 20 nt, synthetic construct
  source 1..20: mol_type = other RNA
ccaacagcctctggccactg

SEQ ID NO: 10140 - RNA, 20 nt, synthetic construct
  source 1..20: mol_type = other RNA
ccaaccatccctgttttcct

SEQ ID NO: 10141 - RNA, 20 nt, synthetic construct
  source 1..20: mol_type = other RNA
ccaaccccctagccactaag

SEQ ID NO: 10142 - RNA, 20 nt, synthetic construct
  source 1..20: mol_type = other RNA
ccaacccctccccattcaac

SEQ ID NO: 10143 - RNA, 20 nt, synthetic construct
  source 1..20: mol_type = other RNA
ccaactgtggggtgactgct

SEQ ID NO: 10144 - RNA, 20 nt, synthetic construct
  source 1..20: mol_type = other RNA
ccaacttattctgattttgt

SEQ ID NO: 10145 - RNA, 20 nt, synthetic construct
  source 1..20: mol_type = other RNA
ccaagaagcaggggagctgg

SEQ ID NO: 10146 - RNA, 20 nt, synthetic construct
  source 1..20: mol_type = other RNA
ccaagagcatgaggtcatgg

SEQ ID NO: 10147 - RNA, 20 nt, synthetic construct
  source 1..20: mol_type = other RNA
ccaagaggagaagcagtttg

SEQ ID NO: 10148 - RNA, 20 nt, synthetic construct
  source 1..20: mol_type = other RNA
ccaagcagtcaccccacagt

SEQ ID NO: 10149 - RNA, 20 nt, synthetic construct
  source 1..20: mol_type = other RNA
ccaagcatcgcccccctgct

SEQ ID NO: 10150 - RNA, 20 nt, synthetic construct
  source 1..20: mol_type = other RNA
ccaaggactcaaacccagaa

SEQ ID NO: 10151 - RNA, 20 nt, synthetic construct
  source 1..20: mol_type = other RNA
ccaagggtcaagctcggaaa

SEQ ID NO: 10152 - RNA, 20 nt, synthetic construct
  source 1..20: mol_type = other RNA
ccaagtaggtggcctggggc

SEQ ID NO: 10153 - RNA, 20 nt, synthetic construct
  source 1..20: mol_type = other RNA
ccaagtccctcacctctcca

SEQ ID NO: 10154 - RNA, 20 nt, synthetic construct
  source 1..20: mol_type = other RNA
ccaagtggttgataaaccca

SEQ ID NO: 10155 - RNA, 20 nt, synthetic construct
  source 1..20: mol_type = other RNA
ccaagttcttagggtacccc

SEQ ID NO: 10156 - RNA, 20 nt, synthetic construct
  source 1..20: mol_type = other RNA
ccaagttttggacccctaag

SEQ ID NO: 10157 - RNA, 20 nt, synthetic construct
  source 1..20: mol_type = other RNA
ccaatgctccaggcctcctg

SEQ ID NO: 10158 - RNA, 20 nt, synthetic construct
  source 1..20: mol_type = other RNA
ccaattgccttagtggctag

SEQ ID NO: 10159 - RNA, 20 nt, synthetic construct
  source 1..20: mol_type = other RNA
ccaatttatattgttcctcc

SEQ ID NO: 10160 - RNA, 20 nt, synthetic construct
  source 1..20: mol_type = other RNA
ccacaaggcctggggcaagt

SEQ ID NO: 10161 - RNA, 20 nt, synthetic construct
  source 1..20: mol_type = other RNA
ccacacccagacctgaccca

SEQ ID NO: 10162 - RNA, 20 nt, synthetic construct
  source 1..20: mol_type = other RNA
ccacacggacacccccctcc

SEQ ID NO: 10163 - RNA, 20 nt, synthetic construct
  source 1..20: mol_type = other RNA
ccacagcaggggggcgatgc

SEQ ID NO: 10164 - RNA, 20 nt, synthetic construct
  source 1..20: mol_type = other RNA
ccacagccctgccaggacgg

SEQ ID NO: 10165 - RNA, 20 nt, synthetic construct
  source 1..20: mol_type = other RNA
ccacaggtggcgcttccagt

SEQ ID NO: 10166 - RNA, 20 nt, synthetic construct
  source 1..20: mol_type = other RNA
ccacagttggaggagaatcc

SEQ ID NO: 10167 - RNA, 20 nt, synthetic construct
  source 1..20: mol_type = other RNA
ccacatggtacctgttagac

SEQ ID NO: 10168 - RNA, 20 nt, synthetic construct
  source 1..20: mol_type = other RNA
ccaccatctcatgcccctgg

SEQ ID NO: 10169 - RNA, 20 nt, synthetic construct
  source 1..20: mol_type = other RNA
ccacccaaaaggcagcctgg

SEQ ID NO: 10170 - RNA, 20 nt, synthetic construct
  source 1..20: mol_type = other RNA
ccacccacaggtggcgcttc

SEQ ID NO: 10171 - RNA, 20 nt, synthetic construct
  source 1..20: mol_type = other RNA
ccacccagtgtccacaaggc

SEQ ID NO: 10172 - RNA, 20 nt, synthetic construct
  source 1..20: mol_type = other RNA
ccacccagttgtcatggcga

SEQ ID NO: 10173 - RNA, 20 nt, synthetic construct
  source 1..20: mol_type = other RNA
ccaccccaatgctccaggcc

SEQ ID NO: 10174 - RNA, 20 nt, synthetic construct
  source 1..20: mol_type = other RNA
ccaccccagcagatactctg

SEQ ID NO: 10175 - RNA, 20 nt, synthetic construct
  source 1..20: mol_type = other RNA
ccaccccagccctgtctacc

SEQ ID NO: 10176 - RNA, 20 nt, synthetic construct
  source 1..20: mol_type = other RNA
ccaccctgcatagccctggg

SEQ ID NO: 10177 - RNA, 20 nt, synthetic construct
  source 1..20: mol_type = other RNA
ccaccctgcgctaccctctc

SEQ ID NO: 10178 - RNA, 20 nt, synthetic construct
  source 1..20: mol_type = other RNA
ccaccctgtgctgggacaga

SEQ ID NO: 10179 - RNA, 20 nt, synthetic construct
  source 1..20: mol_type = other RNA
ccaccgtttctcattcttcc

SEQ ID NO: 10180 - RNA, 20 nt, synthetic construct
  source 1..20: mol_type = other RNA
ccacctacttggcctggacc

SEQ ID NO: 10181 - RNA, 20 nt, synthetic construct
  source 1..20: mol_type = other RNA
ccacctggggctgtgtttct

SEQ ID NO: 10182 - RNA, 20 nt, synthetic construct
  source 1..20: mol_type = other RNA
ccacctgtgggtggtgacgg

SEQ ID NO: 10183 - RNA, 20 nt, synthetic construct
  source 1..20: mol_type = other RNA
ccacgaaaacagatccaggg

SEQ ID NO: 10184 - RNA, 20 nt, synthetic construct
  source 1..20: mol_type = other RNA
ccacgaaaggactcctggct

SEQ ID NO: 10185 - RNA, 20 nt, synthetic construct
  source 1..20: mol_type = other RNA
ccacgacctggtgaacacct

SEQ ID NO: 10186 - RNA, 20 nt, synthetic construct
  source 1..20: mol_type = other RNA
ccacgagaggccaccccagc

SEQ ID NO: 10187 - RNA, 20 nt, synthetic construct
  source 1..20: mol_type = other RNA
ccacgagtccaggccccagc

SEQ ID NO: 10188 - RNA, 20 nt, synthetic construct
  source 1..20: mol_type = other RNA
ccacggcttcgttcctgcag

SEQ ID NO: 10189 - RNA, 20 nt, synthetic construct
  source 1..20: mol_type = other RNA
ccacgggataaattaccccc

SEQ ID NO: 10190 - RNA, 20 nt, synthetic construct
  source 1..20: mol_type = other RNA
ccacggtgtcccagcaagtc

SEQ ID NO: 10191 - RNA, 20 nt, synthetic construct
  source 1..20: mol_type = other RNA
ccacgtaacctgagaaggga

SEQ ID NO: 10192 - RNA, 20 nt, synthetic construct
  source 1..20: mol_type = other RNA
ccacgtggggtaccctaaga

SEQ ID NO: 10193 - RNA, 20 nt, synthetic construct
  source 1..20: mol_type = other RNA
ccacgtgggtttatcaacca

SEQ ID NO: 10194 - RNA, 20 nt, synthetic construct
  source 1..20: mol_type = other RNA
ccactaaggcaattggggtg

SEQ ID NO: 10195 - RNA, 20 nt, synthetic construct
  source 1..20: mol_type = other RNA
ccactgagaaccgggcaggt

SEQ ID NO: 10196 - RNA, 20 nt, synthetic construct
  source 1..20: mol_type = other RNA
ccactgagcactgaaggcct

SEQ ID NO: 10197 - RNA, 20 nt, synthetic construct
  source 1..20: mol_type = other RNA
ccactggctgtttaagatac

SEQ ID NO: 10198 - RNA, 20 nt, synthetic construct
  source 1..20: mol_type = other RNA
ccactgggcaaccaggcgta

SEQ ID NO: 10199 - RNA, 20 nt, synthetic construct
  source 1..20: mol_type = other RNA
ccactgtcctagcaccgtgt

SEQ ID NO: 10200 - RNA, 20 nt, synthetic construct
  source 1..20: mol_type = other RNA
ccacttggtgaggctggtac

SEQ ID NO: 10201 - RNA, 20 nt, synthetic construct
  source 1..20: mol_type = other RNA
ccagaacctgagctgctctg

SEQ ID NO: 10202 - RNA, 20 nt, synthetic construct
  source 1..20: mol_type = other RNA
ccagaagcccagagcagggc

SEQ ID NO: 10203 - RNA, 20 nt, synthetic construct
  source 1..20: mol_type = other RNA
ccagacctgacccaaaccca

SEQ ID NO: 10204 - RNA, 20 nt, synthetic construct
  source 1..20: mol_type = other RNA
ccagacggccgcgtcagagc

SEQ ID NO: 10205 - RNA, 20 nt, synthetic construct
  source 1..20: mol_type = other RNA
ccagagacagtgaccaacca

SEQ ID NO: 10206 - RNA, 20 nt, synthetic construct
  source 1..20: mol_type = other RNA
ccagagcagggccttaggga

SEQ ID NO: 10207 - RNA, 20 nt, synthetic construct
  source 1..20: mol_type = other RNA
ccagagcagggtcccgcttc

SEQ ID NO: 10208 - RNA, 20 nt, synthetic construct
  source 1..20: mol_type = other RNA
ccagaggccccaggccacct

SEQ ID NO: 10209 - RNA, 20 nt, synthetic construct
  source 1..20: mol_type = other RNA
ccagaggctgttgggtcatt

SEQ ID NO: 10210 - RNA, 20 nt, synthetic construct
  source 1..20: mol_type = other RNA
ccagagggagccacgaaaac

SEQ ID NO: 10211 - RNA, 20 nt, synthetic construct
  source 1..20: mol_type = other RNA
ccagaggggtgagacagctg

SEQ ID NO: 10212 - RNA, 20 nt, synthetic construct
  source 1..20: mol_type = other RNA
ccagagtccaggcccaaccc

SEQ ID NO: 10213 - RNA, 20 nt, synthetic construct
  source 1..20: mol_type = other RNA
ccagatagcactggggactc

SEQ ID NO: 10214 - RNA, 20 nt, synthetic construct
  source 1..20: mol_type = other RNA
ccagatgagaagccccctcc

SEQ ID NO: 10215 - RNA, 20 nt, synthetic construct
  source 1..20: mol_type = other RNA
ccagatgggcagctttggag

SEQ ID NO: 10216 - RNA, 20 nt, synthetic construct
  source 1..20: mol_type = other RNA
ccagcaagtcgggactccag

SEQ ID NO: 10217 - RNA, 20 nt, synthetic construct
  source 1..20: mol_type = other RNA
ccagcacagggtggccttcc

SEQ ID NO: 10218 - RNA, 20 nt, synthetic construct
  source 1..20: mol_type = other RNA
ccagcagatactctgcagga

SEQ ID NO: 10219 - RNA, 20 nt, synthetic construct
  source 1..20: mol_type = other RNA
ccagccaggtccttccaagg

SEQ ID NO: 10220 - RNA, 20 nt, synthetic construct
  source 1..20: mol_type = other RNA
ccagcccaccccaatgctcc

SEQ ID NO: 10221 - RNA, 20 nt, synthetic construct
  source 1..20: mol_type = other RNA
ccagccccgcctccctaaga

SEQ ID NO: 10222 - RNA, 20 nt, synthetic construct
  source 1..20: mol_type = other RNA
ccagccccgtcctggcaggg

SEQ ID NO: 10223 - RNA, 20 nt, synthetic construct
  source 1..20: mol_type = other RNA
ccagcccctcctactctagc

SEQ ID NO: 10224 - RNA, 20 nt, synthetic construct
  source 1..20: mol_type = other RNA
ccagcccctcctccctcaga

SEQ ID NO: 10225 - RNA, 20 nt, synthetic construct
  source 1..20: mol_type = other RNA
ccagcccctcctccttcaga

SEQ ID NO: 10226 - RNA, 20 nt, synthetic construct
  source 1..20: mol_type = other RNA
ccagcccctcctctctcaaa

SEQ ID NO: 10227 - RNA, 20 nt, synthetic construct
  source 1..20: mol_type = other RNA
ccagcccctcctgccttaaa

SEQ ID NO: 10228 - RNA, 20 nt, synthetic construct
  source 1..20: mol_type = other RNA
ccagccctgtctaccaggct

SEQ ID NO: 10229 - RNA, 20 nt, synthetic construct
  source 1..20: mol_type = other RNA
ccagcccttccgccctcaga

SEQ ID NO: 10230 - RNA, 20 nt, synthetic construct
  source 1..20: mol_type = other RNA
ccagcctcaccaagtggttg

SEQ ID NO: 10231 - RNA, 20 nt, synthetic construct
  source 1..20: mol_type = other RNA
ccagcctctccccattcaga

SEQ ID NO: 10232 - RNA, 20 nt, synthetic construct
  source 1..20: mol_type = other RNA
ccagctcccctgcttcttgg

SEQ ID NO: 10233 - RNA, 20 nt, synthetic construct
  source 1..20: mol_type = other RNA
ccagctcttctctgttcagc

SEQ ID NO: 10234 - RNA, 20 nt, synthetic construct
  source 1..20: mol_type = other RNA
ccagcttatgctgtttgccc

SEQ ID NO: 10235 - RNA, 20 nt, synthetic construct
  source 1..20: mol_type = other RNA
ccaggaacccctgtagggaa

SEQ ID NO: 10236 - RNA, 20 nt, synthetic construct
  source 1..20: mol_type = other RNA
ccaggacagcctagttttag

SEQ ID NO: 10237 - RNA, 20 nt, synthetic construct
  source 1..20: mol_type = other RNA
ccaggacggggctggctact

SEQ ID NO: 10238 - RNA, 20 nt, synthetic construct
  source 1..20: mol_type = other RNA
ccaggactcctggctctgaa

SEQ ID NO: 10239 - RNA, 20 nt, synthetic construct
  source 1..20: mol_type = other RNA
ccaggagaggcgctcaggct

SEQ ID NO: 10240 - RNA, 20 nt, synthetic construct
  source 1..20: mol_type = other RNA
ccaggagcccaggcccccag

SEQ ID NO: 10241 - RNA, 20 nt, synthetic construct
  source 1..20: mol_type = other RNA
ccaggaggccaggccccagc

SEQ ID NO: 10242 - RNA, 20 nt, synthetic construct
  source 1..20: mol_type = other RNA
ccaggaggcctggagcattg

SEQ ID NO: 10243 - RNA, 20 nt, synthetic construct
  source 1..20: mol_type = other RNA
ccaggagtccaggcccccag

SEQ ID NO: 10244 - RNA, 20 nt, synthetic construct
  source 1..20: mol_type = other RNA
ccaggagtcctggcccccag

SEQ ID NO: 10245 - RNA, 20 nt, synthetic construct
  source 1..20: mol_type = other RNA
ccaggagtcctttcgtggtt

SEQ ID NO: 10246 - RNA, 20 nt, synthetic construct
  source 1..20: mol_type = other RNA
ccaggatcagtgaaacgcac

SEQ ID NO: 10247 - RNA, 20 nt, synthetic construct
  source 1..20: mol_type = other RNA
ccaggattcttagggctgaa

SEQ ID NO: 10248 - RNA, 20 nt, synthetic construct
  source 1..20: mol_type = other RNA
ccaggcacacaggtgtgcag

SEQ ID NO: 10249 - RNA, 20 nt, synthetic construct
  source 1..20: mol_type = other RNA
ccaggcaggtccccaagcat

SEQ ID NO: 10250 - RNA, 20 nt, synthetic construct
  source 1..20: mol_type = other RNA
ccaggccaagtaggtggcct

SEQ ID NO: 10251 - RNA, 20 nt, synthetic construct
  source 1..20: mol_type = other RNA
ccaggccacctacttggcct

SEQ ID NO: 10252 - RNA, 20 nt, synthetic construct
  source 1..20: mol_type = other RNA
ccaggcccaacccctcccca

SEQ ID NO: 10253 - RNA, 20 nt, synthetic construct
  source 1..20: mol_type = other RNA
ccaggcccagccccgcctcc

SEQ ID NO: 10254 - RNA, 20 nt, synthetic construct
  source 1..20: mol_type = other RNA
ccaggccccagcccctcctc

SEQ ID NO: 10255 - RNA, 20 nt, synthetic construct
  source 1..20: mol_type = other RNA
ccaggccccagcccttccgc

SEQ ID NO: 10256 - RNA, 20 nt, synthetic construct
  source 1..20: mol_type = other RNA
ccaggcccccagcctctccc

SEQ ID NO: 10257 - RNA, 20 nt, synthetic construct
  source 1..20: mol_type = other RNA
ccaggcccccagctcttctc

SEQ ID NO: 10258 - RNA, 20 nt, synthetic construct
  source 1..20: mol_type = other RNA
ccaggcccccagtccctcca

SEQ ID NO: 10259 - RNA, 20 nt, synthetic construct
  source 1..20: mol_type = other RNA
ccaggcccctgagtctgtcc

SEQ ID NO: 10260 - RNA, 20 nt, synthetic construct
  source 1..20: mol_type = other RNA
ccaggcctcaggcatctttc

SEQ ID NO: 10261 - RNA, 20 nt, synthetic construct
  source 1..20: mol_type = other RNA
ccaggcctcctgggataccc

SEQ ID NO: 10262 - RNA, 20 nt, synthetic construct
  source 1..20: mol_type = other RNA
ccaggccttcagtgctcagt

SEQ ID NO: 10263 - RNA, 20 nt, synthetic construct
  source 1..20: mol_type = other RNA
ccaggccttgtggacactgg

SEQ ID NO: 10264 - RNA, 20 nt, synthetic construct
  source 1..20: mol_type = other RNA
ccaggcgtatcttaaacagc

SEQ ID NO: 10265 - RNA, 20 nt, synthetic construct
  source 1..20: mol_type = other RNA
ccaggctgccttttgggtgg

SEQ ID NO: 10266 - RNA, 20 nt, synthetic construct
  source 1..20: mol_type = other RNA
ccaggctgtcacactccagt

SEQ ID NO: 10267 - RNA, 20 nt, synthetic construct
  source 1..20: mol_type = other RNA
ccagggacacggtgctagga

SEQ ID NO: 10268 - RNA, 20 nt, synthetic construct
  source 1..20: mol_type = other RNA
ccagggactccagagtccag

SEQ ID NO: 10269 - RNA, 20 nt, synthetic construct
  source 1..20: mol_type = other RNA
ccagggcacgtgcggcccct

SEQ ID NO: 10270 - RNA, 20 nt, synthetic construct
  source 1..20: mol_type = other RNA
ccagggctatgcagggtgga

SEQ ID NO: 10271 - RNA, 20 nt, synthetic construct
  source 1..20: mol_type = other RNA
ccaggggcatgagatggtgg

SEQ ID NO: 10272 - RNA, 20 nt, synthetic construct
  source 1..20: mol_type = other RNA
ccaggggctgacacgggcca

SEQ ID NO: 10273 - RNA, 20 nt, synthetic construct
  source 1..20: mol_type = other RNA
ccagggggtcggaggaggga

SEQ ID NO: 10274 - RNA, 20 nt, synthetic construct
  source 1..20: mol_type = other RNA
ccaggtccttccaagggtca

SEQ ID NO: 10275 - RNA, 20 nt, synthetic construct
  source 1..20: mol_type = other RNA
ccaggtcgtggccgcctcta

SEQ ID NO: 10276 - RNA, 20 nt, synthetic construct
  source 1..20: mol_type = other RNA
ccaggtggagaaactggccg

SEQ ID NO: 10277 - RNA, 20 nt, synthetic construct
  source 1..20: mol_type = other RNA
ccagtacaggcatccctgtg

SEQ ID NO: 10278 - RNA, 20 nt, synthetic construct
  source 1..20: mol_type = other RNA
ccagtagccagccccgtcct

SEQ ID NO: 10279 - RNA, 20 nt, synthetic construct
  source 1..20: mol_type = other RNA
ccagtccctccaccctcaga

SEQ ID NO: 10280 - RNA, 20 nt, synthetic construct
  source 1..20: mol_type = other RNA
ccagtgctatctgggacata

SEQ ID NO: 10281 - RNA, 20 nt, synthetic construct
  source 1..20: mol_type = other RNA
ccagtgctcagactagggaa

SEQ ID NO: 10282 - RNA, 20 nt, synthetic construct
  source 1..20: mol_type = other RNA
ccagtggccagaggctgttg

SEQ ID NO: 10283 - RNA, 20 nt, synthetic construct
  source 1..20: mol_type = other RNA
ccagtggtcaggccggccag

SEQ ID NO: 10284 - RNA, 20 nt, synthetic construct
  source 1..20: mol_type = other RNA
ccagtgtccacaaggcctgg

SEQ ID NO: 10285 - RNA, 20 nt, synthetic construct
  source 1..20: mol_type = other RNA
ccagttcactgaggccccct

SEQ ID NO: 10286 - RNA, 20 nt, synthetic construct
  source 1..20: mol_type = other RNA
ccagttcaggtcccggagcc

SEQ ID NO: 10287 - RNA, 20 nt, synthetic construct
  source 1..20: mol_type = other RNA
ccagttgtcatggcgatagg

SEQ ID NO: 10288 - RNA, 20 nt, synthetic construct
  source 1..20: mol_type = other RNA
ccagtttctccacctggggc

SEQ ID NO: 10289 - RNA, 20 nt, synthetic construct
  source 1..20: mol_type = other RNA
ccatccctgttttcctagga

SEQ ID NO: 10290 - RNA, 20 nt, synthetic construct
  source 1..20: mol_type = other RNA
ccatccttctttccttaaag

SEQ ID NO: 10291 - RNA, 20 nt, synthetic construct
  source 1..20: mol_type = other RNA
ccatctcatgcccctggctc

SEQ ID NO: 10292 - RNA, 20 nt, synthetic construct
  source 1..20: mol_type = other RNA
ccatctggaggaggcgggag

SEQ ID NO: 10293 - RNA, 20 nt, synthetic construct
  source 1..20: mol_type = other RNA
ccatgacaactgggtggaaa

SEQ ID NO: 10294 - RNA, 20 nt, synthetic construct
  source 1..20: mol_type = other RNA
ccatgacctcatgctcttgg

SEQ ID NO: 10295 - RNA, 20 nt, synthetic construct
  source 1..20: mol_type = other RNA
ccatgtggggttcccgcacc

SEQ ID NO: 10296 - RNA, 20 nt, synthetic construct
  source 1..20: mol_type = other RNA
ccattcaacccaggaggcca

SEQ ID NO: 10297 - RNA, 20 nt, synthetic construct
  source 1..20: mol_type = other RNA
ccattcagacccaggggtcc

SEQ ID NO: 10298 - RNA, 20 nt, synthetic construct
  source 1..20: mol_type = other RNA
ccattcctgcaccccaattg

SEQ ID NO: 10299 - RNA, 20 nt, synthetic construct
  source 1..20: mol_type = other RNA
ccattctcacaaagggagtt

SEQ ID NO: 10300 - RNA, 20 nt, synthetic construct
  source 1..20: mol_type = other RNA
ccattgctctccttgccccc

SEQ ID NO: 10301 - RNA, 20 nt, synthetic construct
  source 1..20: mol_type = other RNA
cccaaaaggcagcctggtag

SEQ ID NO: 10302 - RNA, 20 nt, synthetic construct
  source 1..20: mol_type = other RNA
cccaaacccagctcccctgc

SEQ ID NO: 10303 - RNA, 20 nt, synthetic construct
  source 1..20: mol_type = other RNA
cccaacagcctctggccact

SEQ ID NO: 10304 - RNA, 20 nt, synthetic construct
  source 1..20: mol_type = other RNA
cccaaccccctagccactaa

SEQ ID NO: 10305 - RNA, 20 nt, synthetic construct
  source 1..20: mol_type = other RNA
cccaacccctccccattcaa

SEQ ID NO: 10306 - RNA, 20 nt, synthetic construct
  source 1..20: mol_type = other RNA
cccaagaggagaagcagttt

SEQ ID NO: 10307 - RNA, 20 nt, synthetic construct
  source 1..20: mol_type = other RNA
cccaagcatcgcccccctgc

SEQ ID NO: 10308 - RNA, 20 nt, synthetic construct
  source 1..20: mol_type = other RNA
cccaagtccctcacctctcc

SEQ ID NO: 10309 - RNA, 20 nt, synthetic construct
  source 1..20: mol_type = other RNA
cccaagttcttagggtaccc

SEQ ID NO: 10310 - RNA, 20 nt, synthetic construct
  source 1..20: mol_type = other RNA
cccaagttttggacccctaa

SEQ ID NO: 10311 - RNA, 20 nt, synthetic construct
  source 1..20: mol_type = other RNA
cccaatgctccaggcctcct

SEQ ID NO: 10312 - RNA, 20 nt, synthetic construct
  source 1..20: mol_type = other RNA
cccaattgccttagtggcta

SEQ ID NO: 10313 - RNA, 20 nt, synthetic construct
  source 1..20: mol_type = other RNA
cccaatttatattgttcctc

SEQ ID NO: 10314 - RNA, 20 nt, synthetic construct
  source 1..20: mol_type = other RNA
cccacacccagacctgaccc

SEQ ID NO: 10315 - RNA, 20 nt, synthetic construct
  source 1..20: mol_type = other RNA
cccacaggtggcgcttccag

SEQ ID NO: 10316 - RNA, 20 nt, synthetic construct
  source 1..20: mol_type = other RNA
cccacagttggaggagaatc

SEQ ID NO: 10317 - RNA, 20 nt, synthetic construct
  source 1..20: mol_type = other RNA
cccacatggtacctgttaga

SEQ ID NO: 10318 - RNA, 20 nt, synthetic construct
  source 1..20: mol_type = other RNA
cccacccagtgtccacaagg

SEQ ID NO: 10319 - RNA, 20 nt, synthetic construct
  source 1..20: mol_type = other RNA
cccaccccaatgctccaggc

SEQ ID NO: 10320 - RNA, 20 nt, synthetic construct
  source 1..20: mol_type = other RNA
cccacgagaggccaccccag

SEQ ID NO: 10321 - RNA, 20 nt, synthetic construct
  source 1..20: mol_type = other RNA
cccacgagtccaggccccag

SEQ ID NO: 10322 - RNA, 20 nt, synthetic construct
  source 1..20: mol_type = other RNA
cccacggcttcgttcctgca

SEQ ID NO: 10323 - RNA, 20 nt, synthetic construct
  source 1..20: mol_type = other RNA
cccacgtggggtaccctaag

SEQ ID NO: 10324 - RNA, 20 nt, synthetic construct
  source 1..20: mol_type = other RNA
cccacgtgggtttatcaacc

SEQ ID NO: 10325 - RNA, 20 nt, synthetic construct
  source 1..20: mol_type = other RNA
cccactgtcctagcaccgtg

SEQ ID NO: 10326 - RNA, 20 nt, synthetic construct
  source 1..20: mol_type = other RNA
cccagaacctgagctgctct

SEQ ID NO: 10327 - RNA, 20 nt, synthetic construct
  source 1..20: mol_type = other RNA
cccagaagcccagagcaggg

SEQ ID NO: 10328 - RNA, 20 nt, synthetic construct
  source 1..20: mol_type = other RNA
cccagacctgacccaaaccc

SEQ ID NO: 10329 - RNA, 20 nt, synthetic construct
  source 1..20: mol_type = other RNA
cccagagacagtgaccaacc

SEQ ID NO: 10330 - RNA, 20 nt, synthetic construct
  source 1..20: mol_type = other RNA
cccagagcagggccttaggg

SEQ ID NO: 10331 - RNA, 20 nt, synthetic construct
  source 1..20: mol_type = other RNA
cccagagcagggtcccgctt

SEQ ID NO: 10332 - RNA, 20 nt, synthetic construct
  source 1..20: mol_type = other RNA
cccagaggccccaggccacc

SEQ ID NO: 10333 - RNA, 20 nt, synthetic construct
  source 1..20: mol_type = other RNA
cccagaggggtgagacagct

SEQ ID NO: 10334 - RNA, 20 nt, synthetic construct
  source 1..20: mol_type = other RNA
cccagatagcactggggact

SEQ ID NO: 10335 - RNA, 20 nt, synthetic construct
  source 1..20: mol_type = other RNA
cccagatgagaagccccctc

SEQ ID NO: 10336 - RNA, 20 nt, synthetic construct
  source 1..20: mol_type = other RNA
cccagcaagtcgggactcca

SEQ ID NO: 10337 - RNA, 20 nt, synthetic construct
  source 1..20: mol_type = other RNA
cccagcacagggtggccttc

SEQ ID NO: 10338 - RNA, 20 nt, synthetic construct
  source 1..20: mol_type = other RNA
cccagcagatactctgcagg

SEQ ID NO: 10339 - RNA, 20 nt, synthetic construct
  source 1..20: mol_type = other RNA
cccagccaggtccttccaag

SEQ ID NO: 10340 - RNA, 20 nt, synthetic construct
  source 1..20: mol_type = other RNA
cccagcccaccccaatgctc

SEQ ID NO: 10341 - RNA, 20 nt, synthetic construct
  source 1..20: mol_type = other RNA
cccagccccgcctccctaag

SEQ ID NO: 10342 - RNA, 20 nt, synthetic construct
  source 1..20: mol_type = other RNA
cccagcccctcctccctcag

SEQ ID NO: 10343 - RNA, 20 nt, synthetic construct
  source 1..20: mol_type = other RNA
cccagcccctcctctctcaa

SEQ ID NO: 10344 - RNA, 20 nt, synthetic construct
  source 1..20: mol_type = other RNA
cccagcccctcctgccttaa

SEQ ID NO: 10345 - RNA, 20 nt, synthetic construct
  source 1..20: mol_type = other RNA
cccagccctgtctaccaggc

SEQ ID NO: 10346 - RNA, 20 nt, synthetic construct
  source 1..20: mol_type = other RNA
cccagcccttccgccctcag

SEQ ID NO: 10347 - RNA, 20 nt, synthetic construct
  source 1..20: mol_type = other RNA
cccagcctctccccattcag

SEQ ID NO: 10348 - RNA, 20 nt, synthetic construct
  source 1..20: mol_type = other RNA
cccagctcccctgcttcttg

SEQ ID NO: 10349 - RNA, 20 nt, synthetic construct
  source 1..20: mol_type = other RNA
cccagctcttctctgttcag

SEQ ID NO: 10350 - RNA, 20 nt, synthetic construct
  source 1..20: mol_type = other RNA
cccaggacagcctagtttta

SEQ ID NO: 10351 - RNA, 20 nt, synthetic construct
  source 1..20: mol_type = other RNA
cccaggagaggcgctcaggc

SEQ ID NO: 10352 - RNA, 20 nt, synthetic construct
  source 1..20: mol_type = other RNA
cccaggagcccaggccccca

SEQ ID NO: 10353 - RNA, 20 nt, synthetic construct
  source 1..20: mol_type = other RNA
cccaggaggccaggccccag

SEQ ID NO: 10354 - RNA, 20 nt, synthetic construct
  source 1..20: mol_type = other RNA
cccaggaggcctggagcatt

SEQ ID NO: 10355 - RNA, 20 nt, synthetic construct
  source 1..20: mol_type = other RNA
cccaggcacacaggtgtgca

SEQ ID NO: 10356 - RNA, 20 nt, synthetic construct
  source 1..20: mol_type = other RNA
cccaggccacctacttggcc

SEQ ID NO: 10357 - RNA, 20 nt, synthetic construct
  source 1..20: mol_type = other RNA
cccaggcccccagctcttct

SEQ ID NO: 10358 - RNA, 20 nt, synthetic construct
  source 1..20: mol_type = other RNA
cccaggcccctgagtctgtc

SEQ ID NO: 10359 - RNA, 20 nt, synthetic construct
  source 1..20: mol_type = other RNA
cccaggcctcaggcatcttt

SEQ ID NO: 10360 - RNA, 20 nt, synthetic construct
  source 1..20: mol_type = other RNA
cccaggccttgtggacactg

SEQ ID NO: 10361 - RNA, 20 nt, synthetic construct
  source 1..20: mol_type = other RNA
cccaggctgtcacactccag

SEQ ID NO: 10362 - RNA, 20 nt, synthetic construct
  source 1..20: mol_type = other RNA
cccagggcacgtgcggcccc

SEQ ID NO: 10363 - RNA, 20 nt, synthetic construct
  source 1..20: mol_type = other RNA
cccagggctatgcagggtgg

SEQ ID NO: 10364 - RNA, 20 nt, synthetic construct
  source 1..20: mol_type = other RNA
cccaggtggagaaactggcc

SEQ ID NO: 10365 - RNA, 20 nt, synthetic construct
  source 1..20: mol_type = other RNA
cccagtacaggcatccctgt

SEQ ID NO: 10366 - RNA, 20 nt, synthetic construct
  source 1..20: mol_type = other RNA
cccagtccctccaccctcag

SEQ ID NO: 10367 - RNA, 20 nt, synthetic construct
  source 1..20: mol_type = other RNA
cccagtgctatctgggacat

SEQ ID NO: 10368 - RNA, 20 nt, synthetic construct
  source 1..20: mol_type = other RNA
cccagtggtcaggccggcca

SEQ ID NO: 10369 - RNA, 20 nt, synthetic construct
  source 1..20: mol_type = other RNA
cccagtgtccacaaggcctg

SEQ ID NO: 10370 - RNA, 20 nt, synthetic construct
  source 1..20: mol_type = other RNA
cccagttgtcatggcgatag

SEQ ID NO: 10371 - RNA, 20 nt, synthetic construct
  source 1..20: mol_type = other RNA
cccatctggaggaggcggga

SEQ ID NO: 10372 - RNA, 20 nt, synthetic construct
  source 1..20: mol_type = other RNA
cccattcaacccaggaggcc

SEQ ID NO: 10373 - RNA, 20 nt, synthetic construct
  source 1..20: mol_type = other RNA
cccattcagacccaggggtc

SEQ ID NO: 10374 - RNA, 20 nt, synthetic construct
  source 1..20: mol_type = other RNA
cccattcctgcaccccaatt

SEQ ID NO: 10375 - RNA, 20 nt, synthetic construct
  source 1..20: mol_type = other RNA
cccattgctctccttgcccc

SEQ ID NO: 10376 - RNA, 20 nt, synthetic construct
  source 1..20: mol_type = other RNA
ccccaaccccctagccacta

SEQ ID NO: 10377 - RNA, 20 nt, synthetic construct
  source 1..20: mol_type = other RNA
ccccaagcatcgcccccctg

SEQ ID NO: 10378 - RNA, 20 nt, synthetic construct
  source 1..20: mol_type = other RNA
ccccaagtccctcacctctc

SEQ ID NO: 10379 - RNA, 20 nt, synthetic construct
  source 1..20: mol_type = other RNA
ccccaagttttggaccccta

SEQ ID NO: 10380 - RNA, 20 nt, synthetic construct
  source 1..20: mol_type = other RNA
ccccaatgctccaggcctcc

SEQ ID NO: 10381 - RNA, 20 nt, synthetic construct
  source 1..20: mol_type = other RNA
ccccaattgccttagtggct

SEQ ID NO: 10382 - RNA, 20 nt, synthetic construct
  source 1..20: mol_type = other RNA
ccccaatttatattgttcct

SEQ ID NO: 10383 - RNA, 20 nt, synthetic construct
  source 1..20: mol_type = other RNA
ccccacacccagacctgacc

SEQ ID NO: 10384 - RNA, 20 nt, synthetic construct
  source 1..20: mol_type = other RNA
ccccacagttggaggagaat

SEQ ID NO: 10385 - RNA, 20 nt, synthetic construct
  source 1..20: mol_type = other RNA
ccccacatggtacctgttag

SEQ ID NO: 10386 - RNA, 20 nt, synthetic construct
  source 1..20: mol_type = other RNA
ccccacgagaggccacccca

SEQ ID NO: 10387 - RNA, 20 nt, synthetic construct
  source 1..20: mol_type = other RNA
ccccacgtgggtttatcaac

SEQ ID NO: 10388 - RNA, 20 nt, synthetic construct
  source 1..20: mol_type = other RNA
ccccactgtcctagcaccgt

SEQ ID NO: 10389 - RNA, 20 nt, synthetic construct
  source 1..20: mol_type = other RNA
ccccagaggccccaggccac

SEQ ID NO: 10390 - RNA, 20 nt, synthetic construct
  source 1..20: mol_type = other RNA
ccccagcagatactctgcag

SEQ ID NO: 10391 - RNA, 20 nt, synthetic construct
  source 1..20: mol_type = other RNA
ccccagcccaccccaatgct

SEQ ID NO: 10392 - RNA, 20 nt, synthetic construct
  source 1..20: mol_type = other RNA
ccccagcccctcctctctca

SEQ ID NO: 10393 - RNA, 20 nt, synthetic construct
  source 1..20: mol_type = other RNA
ccccagcccctcctgcctta

SEQ ID NO: 10394 - RNA, 20 nt, synthetic construct
  source 1..20: mol_type = other RNA
ccccagccctgtctaccagg

SEQ ID NO: 10395 - RNA, 20 nt, synthetic construct
  source 1..20: mol_type = other RNA
ccccagcccttccgccctca

SEQ ID NO: 10396 - RNA, 20 nt, synthetic construct
  source 1..20: mol_type = other RNA
ccccagcctctccccattca

SEQ ID NO: 10397 - RNA, 20 nt, synthetic construct
  source 1..20: mol_type = other RNA
ccccagctcttctctgttca

SEQ ID NO: 10398 - RNA, 20 nt, synthetic construct
  source 1..20: mol_type = other RNA
ccccaggccacctacttggc

SEQ ID NO: 10399 - RNA, 20 nt, synthetic construct
  source 1..20: mol_type = other RNA
ccccaggccttgtggacact

SEQ ID NO: 10400 - RNA, 20 nt, synthetic construct
  source 1..20: mol_type = other RNA
ccccaggctgtcacactcca

SEQ ID NO: 10401 - RNA, 20 nt, synthetic construct
  source 1..20: mol_type = other RNA
ccccaggtggagaaactggc

SEQ ID NO: 10402 - RNA, 20 nt, synthetic construct
  source 1..20: mol_type = other RNA
ccccagtccctccaccctca

SEQ ID NO: 10403 - RNA, 20 nt, synthetic construct
  source 1..20: mol_type = other RNA
ccccagtgctatctgggaca

SEQ ID NO: 10404 - RNA, 20 nt, synthetic construct
  source 1..20: mol_type = other RNA
ccccattcaacccaggaggc

SEQ ID NO: 10405 - RNA, 20 nt, synthetic construct
  source 1..20: mol_type = other RNA
ccccattcagacccaggggt

SEQ ID NO: 10406 - RNA, 20 nt, synthetic construct
  source 1..20: mol_type = other RNA
ccccattcctgcaccccaat

SEQ ID NO: 10407 - RNA, 20 nt, synthetic construct
  source 1..20: mol_type = other RNA
cccccaaccccctagccact

SEQ ID NO: 10408 - RNA, 20 nt, synthetic construct
  source 1..20: mol_type = other RNA
cccccaagtccctcacctct

SEQ ID NO: 10409 - RNA, 20 nt, synthetic construct
  source 1..20: mol_type = other RNA
cccccaagttttggacccct

SEQ ID NO: 10410 - RNA, 20 nt, synthetic construct
  source 1..20: mol_type = other RNA
cccccagaggccccaggcca

SEQ ID NO: 10411 - RNA, 20 nt, synthetic construct
  source 1..20: mol_type = other RNA
cccccagcccctcctgcctt

SEQ ID NO: 10412 - RNA, 20 nt, synthetic construct
  source 1..20: mol_type = other RNA
cccccagcctctccccattc

SEQ ID NO: 10413 - RNA, 20 nt, synthetic construct
  source 1..20: mol_type = other RNA
cccccagctcttctctgttc

SEQ ID NO: 10414 - RNA, 20 nt, synthetic construct
  source 1..20: mol_type = other RNA
cccccagtccctccaccctc

SEQ ID NO: 10415 - RNA, 20 nt, synthetic construct
  source 1..20: mol_type = other RNA
cccccattcctgcaccccaa

SEQ ID NO: 10416 - RNA, 20 nt, synthetic construct
  source 1..20: mol_type = other RNA
ccccccaagtccctcacctc

SEQ ID NO: 10417 - RNA, 20 nt, synthetic construct
  source 1..20: mol_type = other RNA
ccccccaagttttggacccc

SEQ ID NO: 10418 - RNA, 20 nt, synthetic construct
  source 1..20: mol_type = other RNA
cccccctcccctatcgccat

SEQ ID NO: 10419 - RNA, 20 nt, synthetic construct
  source 1..20: mol_type = other RNA
cccccctcctcaccacagcc

SEQ ID NO: 10420 - RNA, 20 nt, synthetic construct
  source 1..20: mol_type = other RNA
cccccctgctgtggctgttc

SEQ ID NO: 10421 - RNA, 20 nt, synthetic construct
  source 1..20: mol_type = other RNA
cccccgtcaccacccacagg

SEQ ID NO: 10422 - RNA, 20 nt, synthetic construct
  source 1..20: mol_type = other RNA
ccccctagccactaaggcaa

SEQ ID NO: 10423 - RNA, 20 nt, synthetic construct
  source 1..20: mol_type = other RNA
ccccctcccctatcgccatg

SEQ ID NO: 10424 - RNA, 20 nt, synthetic construct
  source 1..20: mol_type = other RNA
ccccctcccttccccgttca

SEQ ID NO: 10425 - RNA, 20 nt, synthetic construct
  source 1..20: mol_type = other RNA
ccccctcctcaccacagccc

SEQ ID NO: 10426 - RNA, 20 nt, synthetic construct
  source 1..20: mol_type = other RNA
ccccctctgcacggggccct

SEQ ID NO: 10427 - RNA, 20 nt, synthetic construct
  source 1..20: mol_type = other RNA
ccccctgctgtggctgttcc

SEQ ID NO: 10428 - RNA, 20 nt, synthetic construct
  source 1..20: mol_type = other RNA
ccccctggacttcggctttt

SEQ ID NO: 10429 - RNA, 20 nt, synthetic construct
  source 1..20: mol_type = other RNA
cccccttcccctgcatcccc

SEQ ID NO: 10430 - RNA, 20 nt, synthetic construct
  source 1..20: mol_type = other RNA
cccccttcctcgtccaccat

SEQ ID NO: 10431 - RNA, 20 nt, synthetic construct
  source 1..20: mol_type = other RNA
ccccgaagagtgagtttgcc

SEQ ID NO: 10432 - RNA, 20 nt, synthetic construct
  source 1..20: mol_type = other RNA
ccccgcctccctaagaccca

SEQ ID NO: 10433 - RNA, 20 nt, synthetic construct
  source 1..20: mol_type = other RNA
ccccgtcaccacccacaggt

SEQ ID NO: 10434 - RNA, 20 nt, synthetic construct
  source 1..20: mol_type = other RNA
ccccgtcctggcagggctgt

SEQ ID NO: 10435 - RNA, 20 nt, synthetic construct
  source 1..20: mol_type = other RNA
ccccgtgcagagggggcctc

SEQ ID NO: 10436 - RNA, 20 nt, synthetic construct
  source 1..20: mol_type = other RNA
ccccgttcacttcctgtttg

SEQ ID NO: 10437 - RNA, 20 nt, synthetic construct
  source 1..20: mol_type = other RNA
ccccgttcccctgcatcccc

SEQ ID NO: 10438 - RNA, 20 nt, synthetic construct
  source 1..20: mol_type = other RNA
cccctaagggaagaatgaga

SEQ ID NO: 10439 - RNA, 20 nt, synthetic construct
  source 1..20: mol_type = other RNA
cccctagccactaaggcaat

SEQ ID NO: 10440 - RNA, 20 nt, synthetic construct
  source 1..20: mol_type = other RNA
cccctatcgccatgacaact

SEQ ID NO: 10441 - RNA, 20 nt, synthetic construct
  source 1..20: mol_type = other RNA
cccctccccattcaacccag

SEQ ID NO: 10442 - RNA, 20 nt, synthetic construct
  source 1..20: mol_type = other RNA
cccctcccctatcgccatga

SEQ ID NO: 10443 - RNA, 20 nt, synthetic construct
  source 1..20: mol_type = other RNA
cccctcccttccccgttcac

SEQ ID NO: 10444 - RNA, 20 nt, synthetic construct
  source 1..20: mol_type = other RNA
cccctcctactctagccccc

SEQ ID NO: 10445 - RNA, 20 nt, synthetic construct
  source 1..20: mol_type = other RNA
cccctcctcaccacagccct

SEQ ID NO: 10446 - RNA, 20 nt, synthetic construct
  source 1..20: mol_type = other RNA
cccctcctccttcagagcca

SEQ ID NO: 10447 - RNA, 20 nt, synthetic construct
  source 1..20: mol_type = other RNA
cccctcctctctcaaaccca

SEQ ID NO: 10448 - RNA, 20 nt, synthetic construct
  source 1..20: mol_type = other RNA
cccctcctgccttaaaccca

SEQ ID NO: 10449 - RNA, 20 nt, synthetic construct
  source 1..20: mol_type = other RNA
cccctctgcacggggccctg

SEQ ID NO: 10450 - RNA, 20 nt, synthetic construct
  source 1..20: mol_type = other RNA
cccctctgggagtcccgccc

SEQ ID NO: 10451 - RNA, 20 nt, synthetic construct
  source 1..20: mol_type = other RNA
cccctgagtctgtcccagca

SEQ ID NO: 10452 - RNA, 20 nt, synthetic construct
  source 1..20: mol_type = other RNA
cccctgcatcccccagaggc

SEQ ID NO: 10453 - RNA, 20 nt, synthetic construct
  source 1..20: mol_type = other RNA
cccctgcatcccccttcccc

SEQ ID NO: 10454 - RNA, 20 nt, synthetic construct
  source 1..20: mol_type = other RNA
cccctgcatccccgttcccc

SEQ ID NO: 10455 - RNA, 20 nt, synthetic construct
  source 1..20: mol_type = other RNA
cccctgctgtggctgttccc

SEQ ID NO: 10456 - RNA, 20 nt, synthetic construct
  source 1..20: mol_type = other RNA
cccctgcttcttggccacgt

SEQ ID NO: 10457 - RNA, 20 nt, synthetic construct
  source 1..20: mol_type = other RNA
cccctggacttcggcttttg

SEQ ID NO: 10458 - RNA, 20 nt, synthetic construct
  source 1..20: mol_type = other RNA
cccctggctctcctgcccct

SEQ ID NO: 10459 - RNA, 20 nt, synthetic construct
  source 1..20: mol_type = other RNA
cccctggctgcagggccccg

SEQ ID NO: 10460 - RNA, 20 nt, synthetic construct
  source 1..20: mol_type = other RNA
cccctgggtctgaatgggga

SEQ ID NO: 10461 - RNA, 20 nt, synthetic construct
  source 1..20: mol_type = other RNA
cccctgtagggaaggggcag

SEQ ID NO: 10462 - RNA, 20 nt, synthetic construct
  source 1..20: mol_type = other RNA
ccccttcacagcccgagttt

SEQ ID NO: 10463 - RNA, 20 nt, synthetic construct
  source 1..20: mol_type = other RNA
ccccttcccctgcatccccc

SEQ ID NO: 10464 - RNA, 20 nt, synthetic construct
  source 1..20: mol_type = other RNA
ccccttccctacaggggttc

SEQ ID NO: 10465 - RNA, 20 nt, synthetic construct
  source 1..20: mol_type = other RNA
ccccttcctcgtccaccatc

SEQ ID NO: 10466 - RNA, 20 nt, synthetic construct
  source 1..20: mol_type = other RNA
cccgaagagtgagtttgcca

SEQ ID NO: 10467 - RNA, 20 nt, synthetic construct
  source 1..20: mol_type = other RNA
cccgagtttccatgacctca

SEQ ID NO: 10468 - RNA, 20 nt, synthetic construct
  source 1..20: mol_type = other RNA
cccgcacccagatgagaagc

SEQ ID NO: 10469 - RNA, 20 nt, synthetic construct
  source 1..20: mol_type = other RNA
cccgcccaggcccctgagtc

SEQ ID NO: 10470 - RNA, 20 nt, synthetic construct
  source 1..20: mol_type = other RNA
cccgcctccctaagacccag

SEQ ID NO: 10471 - RNA, 20 nt, synthetic construct
  source 1..20: mol_type = other RNA
cccgcctcctccagatgggc

SEQ ID NO: 10472 - RNA, 20 nt, synthetic construct
  source 1..20: mol_type = other RNA
cccgcttccctaaggccctg

SEQ ID NO: 10473 - RNA, 20 nt, synthetic construct
  source 1..20: mol_type = other RNA
cccggagcccacccagtgtc

SEQ ID NO: 10474 - RNA, 20 nt, synthetic construct
  source 1..20: mol_type = other RNA
cccggccagtttctccacct

SEQ ID NO: 10475 - RNA, 20 nt, synthetic construct
  source 1..20: mol_type = other RNA
cccggttctcagtggccacc

SEQ ID NO: 10476 - RNA, 20 nt, synthetic construct
  source 1..20: mol_type = other RNA
cccgtcaccacccacaggtg

SEQ ID NO: 10477 - RNA, 20 nt, synthetic construct
  source 1..20: mol_type = other RNA
cccgtcctggcagggctgtg

SEQ ID NO: 10478 - RNA, 20 nt, synthetic construct
  source 1..20: mol_type = other RNA
cccgtgcagagggggcctca

SEQ ID NO: 10479 - RNA, 20 nt, synthetic construct
  source 1..20: mol_type = other RNA
cccgtggatctaggagttta

SEQ ID NO: 10480 - RNA, 20 nt, synthetic construct
  source 1..20: mol_type = other RNA
cccgtgtcagcccctggctg

SEQ ID NO: 10481 - RNA, 20 nt, synthetic construct
  source 1..20: mol_type = other RNA
cccgttcacttcctgtttgc

SEQ ID NO: 10482 - RNA, 20 nt, synthetic construct
  source 1..20: mol_type = other RNA
cccgttcccagggcacgtgc

SEQ ID NO: 10483 - RNA, 20 nt, synthetic construct
  source 1..20: mol_type = other RNA
cccgttcccctgcatccccc

SEQ ID NO: 10484 - RNA, 20 nt, synthetic construct
  source 1..20: mol_type = other RNA
cccgttcccctgcatccccg

SEQ ID NO: 10485 - RNA, 20 nt, synthetic construct
  source 1..20: mol_type = other RNA
ccctaagaacttgggaacag

SEQ ID NO: 10486 - RNA, 20 nt, synthetic construct
  source 1..20: mol_type = other RNA
ccctaagaatcctggctcca

SEQ ID NO: 10487 - RNA, 20 nt, synthetic construct
  source 1..20: mol_type = other RNA
ccctaagacccagaagtcca

SEQ ID NO: 10488 - RNA, 20 nt, synthetic construct
  source 1..20: mol_type = other RNA
ccctaaggccctgctctggg

SEQ ID NO: 10489 - RNA, 20 nt, synthetic construct
  source 1..20: mol_type = other RNA
ccctaagggaagaatgagaa

SEQ ID NO: 10490 - RNA, 20 nt, synthetic construct
  source 1..20: mol_type = other RNA
ccctacaggggttcctggct

SEQ ID NO: 10491 - RNA, 20 nt, synthetic construct
  source 1..20: mol_type = other RNA
ccctagccactaaggcaatt

SEQ ID NO: 10492 - RNA, 20 nt, synthetic construct
  source 1..20: mol_type = other RNA
ccctagtctgagcactggaa

SEQ ID NO: 10493 - RNA, 20 nt, synthetic construct
  source 1..20: mol_type = other RNA
ccctatcgccatgacaactg

SEQ ID NO: 10494 - RNA, 20 nt, synthetic construct
  source 1..20: mol_type = other RNA
ccctcacctctccaaagctg

SEQ ID NO: 10495 - RNA, 20 nt, synthetic construct
  source 1..20: mol_type = other RNA
ccctcagatgaaggagtcca

SEQ ID NO: 10496 - RNA, 20 nt, synthetic construct
  source 1..20: mol_type = other RNA
ccctcagtcctaggaaaaca

SEQ ID NO: 10497 - RNA, 20 nt, synthetic construct
  source 1..20: mol_type = other RNA
ccctccccattcaacccagg

SEQ ID NO: 10498 - RNA, 20 nt, synthetic construct
  source 1..20: mol_type = other RNA
ccctcccctatcgccatgac

SEQ ID NO: 10499 - RNA, 20 nt, synthetic construct
  source 1..20: mol_type = other RNA
ccctcccgcctcctccagat

SEQ ID NO: 10500 - RNA, 20 nt, synthetic construct
  source 1..20: mol_type = other RNA
ccctcccttccccgttcact

SEQ ID NO: 10501 - RNA, 20 nt, synthetic construct
  source 1..20: mol_type = other RNA
ccctcctactctagccccca

SEQ ID NO: 10502 - RNA, 20 nt, synthetic construct
  source 1..20: mol_type = other RNA
ccctcctcaccacagccctg

SEQ ID NO: 10503 - RNA, 20 nt, synthetic construct
  source 1..20: mol_type = other RNA
ccctcctccgaccccctgga

SEQ ID NO: 10504 - RNA, 20 nt, synthetic construct
  source 1..20: mol_type = other RNA
ccctcctccttcagagccag

SEQ ID NO: 10505 - RNA, 20 nt, synthetic construct
  source 1..20: mol_type = other RNA
ccctcctctctcaaacccag

SEQ ID NO: 10506 - RNA, 20 nt, synthetic construct
  source 1..20: mol_type = other RNA
ccctcctctctgaaccccag

SEQ ID NO: 10507 - RNA, 20 nt, synthetic construct
  source 1..20: mol_type = other RNA
ccctcctgccttaaacccag

SEQ ID NO: 10508 - RNA, 20 nt, synthetic construct
  source 1..20: mol_type = other RNA
ccctcggacccaggagtcca

SEQ ID NO: 10509 - RNA, 20 nt, synthetic construct
  source 1..20: mol_type = other RNA
ccctcgtagctccctcccgc

SEQ ID NO: 10510 - RNA, 20 nt, synthetic construct
  source 1..20: mol_type = other RNA
ccctctcccagaacctgagc

SEQ ID NO: 10511 - RNA, 20 nt, synthetic construct
  source 1..20: mol_type = other RNA
ccctctgcacggggccctgc

SEQ ID NO: 10512 - RNA, 20 nt, synthetic construct
  source 1..20: mol_type = other RNA
ccctctggagtcccgacttg

SEQ ID NO: 10513 - RNA, 20 nt, synthetic construct
  source 1..20: mol_type = other RNA
ccctctgggagtcccgccca

SEQ ID NO: 10514 - RNA, 20 nt, synthetic construct
  source 1..20: mol_type = other RNA
ccctgagtctgtcccagcac

SEQ ID NO: 10515 - RNA, 20 nt, synthetic construct
  source 1..20: mol_type = other RNA
ccctgcagccaggggctgac

SEQ ID NO: 10516 - RNA, 20 nt, synthetic construct
  source 1..20: mol_type = other RNA
ccctgcatagccctgggccc

SEQ ID NO: 10517 - RNA, 20 nt, synthetic construct
  source 1..20: mol_type = other RNA
ccctgcatcccccagaggcc

SEQ ID NO: 10518 - RNA, 20 nt, synthetic construct
  source 1..20: mol_type = other RNA
ccctgcatcccccttcccct

SEQ ID NO: 10519 - RNA, 20 nt, synthetic construct
  source 1..20: mol_type = other RNA
ccctgcatccccgttcccct

SEQ ID NO: 10520 - RNA, 20 nt, synthetic construct
  source 1..20: mol_type = other RNA
ccctgccaggacggggctgg

SEQ ID NO: 10521 - RNA, 20 nt, synthetic construct
  source 1..20: mol_type = other RNA
ccctgcccccattcctgcac

SEQ ID NO: 10522 - RNA, 20 nt, synthetic construct
  source 1..20: mol_type = other RNA
ccctgcgctaccctctccca

SEQ ID NO: 10523 - RNA, 20 nt, synthetic construct
  source 1..20: mol_type = other RNA
ccctgctctgggcggaggaa

SEQ ID NO: 10524 - RNA, 20 nt, synthetic construct
  source 1..20: mol_type = other RNA
ccctgctctgggcttctggg

SEQ ID NO: 10525 - RNA, 20 nt, synthetic construct
  source 1..20: mol_type = other RNA
ccctgctgtggctgttccca

SEQ ID NO: 10526 - RNA, 20 nt, synthetic construct
  source 1..20: mol_type = other RNA
ccctgcttcttggccacgta

SEQ ID NO: 10527 - RNA, 20 nt, synthetic construct
  source 1..20: mol_type = other RNA
ccctggacttcggcttttgt

SEQ ID NO: 10528 - RNA, 20 nt, synthetic construct
  source 1..20: mol_type = other RNA
ccctggatctgttttcgtgg

SEQ ID NO: 10529 - RNA, 20 nt, synthetic construct
  source 1..20: mol_type = other RNA
ccctggctctcctgcccctt

SEQ ID NO: 10530 - RNA, 20 nt, synthetic construct
  source 1..20: mol_type = other RNA
ccctggctgcagggccccgt

SEQ ID NO: 10531 - RNA, 20 nt, synthetic construct
  source 1..20: mol_type = other RNA
ccctgggaacgggatgaact

SEQ ID NO: 10532 - RNA, 20 nt, synthetic construct
  source 1..20: mol_type = other RNA
ccctgggcccacggcttcgt

SEQ ID NO: 10533 - RNA, 20 nt, synthetic construct
  source 1..20: mol_type = other RNA
ccctgggtctgaatggggag

SEQ ID NO: 10534 - RNA, 20 nt, synthetic construct
  source 1..20: mol_type = other RNA
ccctggtgcccaggcctcag

SEQ ID NO: 10535 - RNA, 20 nt, synthetic construct
  source 1..20: mol_type = other RNA
ccctgtagggaaggggcagg

SEQ ID NO: 10536 - RNA, 20 nt, synthetic construct
  source 1..20: mol_type = other RNA
ccctgtcccccttcctcgtc

SEQ ID NO: 10537 - RNA, 20 nt, synthetic construct
  source 1..20: mol_type = other RNA
ccctgtctaccaggctgcct

SEQ ID NO: 10538 - RNA, 20 nt, synthetic construct
  source 1..20: mol_type = other RNA
ccctgtgaaagatgcctgag

SEQ ID NO: 10539 - RNA, 20 nt, synthetic construct
  source 1..20: mol_type = other RNA
ccctgtgctgggacagactc

SEQ ID NO: 10540 - RNA, 20 nt, synthetic construct
  source 1..20: mol_type = other RNA
ccctgttttcctaggactga

SEQ ID NO: 10541 - RNA, 20 nt, synthetic construct
  source 1..20: mol_type = other RNA
cccttaggggtccaaaactt

SEQ ID NO: 10542 - RNA, 20 nt, synthetic construct
  source 1..20: mol_type = other RNA
cccttcacagcccgagtttc

SEQ ID NO: 10543 - RNA, 20 nt, synthetic construct
  source 1..20: mol_type = other RNA
cccttccccgttcacttcct

SEQ ID NO: 10544 - RNA, 20 nt, synthetic construct
  source 1..20: mol_type = other RNA
cccttcccctgcatccccca

SEQ ID NO: 10545 - RNA, 20 nt, synthetic construct
  source 1..20: mol_type = other RNA
cccttccctacaggggttcc

SEQ ID NO: 10546 - RNA, 20 nt, synthetic construct
  source 1..20: mol_type = other RNA
cccttccgccctcagatgaa

SEQ ID NO: 10547 - RNA, 20 nt, synthetic construct
  source 1..20: mol_type = other RNA
cccttcctcgtccaccatct

SEQ ID NO: 10548 - RNA, 20 nt, synthetic construct
  source 1..20: mol_type = other RNA
cccttctcaggttacgtggc

SEQ ID NO: 10549 - RNA, 20 nt, synthetic construct
  source 1..20: mol_type = other RNA
cccttggaaggacctggctg

SEQ ID NO: 10550 - RNA, 20 nt, synthetic construct
  source 1..20: mol_type = other RNA
ccctttcaaggacctgccca

SEQ ID NO: 10551 - RNA, 20 nt, synthetic construct
  source 1..20: mol_type = other RNA
ccctttctctttctccatcc

SEQ ID NO: 10552 - RNA, 20 nt, synthetic construct
  source 1..20: mol_type = other RNA
ccctttgtgagaatggtgcg

SEQ ID NO: 10553 - RNA, 20 nt, synthetic construct
  source 1..20: mol_type = other RNA
ccgaagagtgagtttgccaa

SEQ ID NO: 10554 - RNA, 20 nt, synthetic construct
  source 1..20: mol_type = other RNA
ccgaagtccagggggtcgga

SEQ ID NO: 10555 - RNA, 20 nt, synthetic construct
  source 1..20: mol_type = other RNA
ccgaccccctggacttcggc

SEQ ID NO: 10556 - RNA, 20 nt, synthetic construct
  source 1..20: mol_type = other RNA
ccgagcttgacccttggaag

SEQ ID NO: 10557 - RNA, 20 nt, synthetic construct
  source 1..20: mol_type = other RNA
ccgagttcatcccgttccca

SEQ ID NO: 10558 - RNA, 20 nt, synthetic construct
  source 1..20: mol_type = other RNA
ccgagtttccatgacctcat

SEQ ID NO: 10559 - RNA, 20 nt, synthetic construct
  source 1..20: mol_type = other RNA
ccgcacccagatgagaagcc

SEQ ID NO: 10560 - RNA, 20 nt, synthetic construct
  source 1..20: mol_type = other RNA
ccgcacgtgccctgggaacg

SEQ ID NO: 10561 - RNA, 20 nt, synthetic construct
  source 1..20: mol_type = other RNA
ccgcccagagcagggtcccg

SEQ ID NO: 10562 - RNA, 20 nt, synthetic construct
  source 1..20: mol_type = other RNA
ccgcccaggcccctgagtct

SEQ ID NO: 10563 - RNA, 20 nt, synthetic construct
  source 1..20: mol_type = other RNA
ccgccctcagatgaaggagt

SEQ ID NO: 10564 - RNA, 20 nt, synthetic construct
  source 1..20: mol_type = other RNA
ccgcctccctaagacccaga

SEQ ID NO: 10565 - RNA, 20 nt, synthetic construct
  source 1..20: mol_type = other RNA
ccgcctcctccagatgggca

SEQ ID NO: 10566 - RNA, 20 nt, synthetic construct
  source 1..20: mol_type = other RNA
ccgcctctactccctttctc

SEQ ID NO: 10567 - RNA, 20 nt, synthetic construct
  source 1..20: mol_type = other RNA
ccgcgtcagagcagctcagg

SEQ ID NO: 10568 - RNA, 20 nt, synthetic construct
  source 1..20: mol_type = other RNA
ccgcttccctaaggccctgc

SEQ ID NO: 10569 - RNA, 20 nt, synthetic construct
  source 1..20: mol_type = other RNA
ccggagcccacccagtgtcc

SEQ ID NO: 10570 - RNA, 20 nt, synthetic construct
  source 1..20: mol_type = other RNA
ccggccaggccttcagtgct

SEQ ID NO: 10571 - RNA, 20 nt, synthetic construct
  source 1..20: mol_type = other RNA
ccggccagtttctccacctg

SEQ ID NO: 10572 - RNA, 20 nt, synthetic construct
  source 1..20: mol_type = other RNA
ccggcctgaccactgggcaa

SEQ ID NO: 10573 - RNA, 20 nt, synthetic construct
  source 1..20: mol_type = other RNA
ccgggaatcaagagtcaccc

SEQ ID NO: 10574 - RNA, 20 nt, synthetic construct
  source 1..20: mol_type = other RNA
ccgggacctgaactggagct

SEQ ID NO: 10575 - RNA, 20 nt, synthetic construct
  source 1..20: mol_type = other RNA
ccggttctcagtggccaccc

SEQ ID NO: 10576 - RNA, 20 nt, synthetic construct
  source 1..20: mol_type = other RNA
ccgtcaccacccacaggtgg

SEQ ID NO: 10577 - RNA, 20 nt, synthetic construct
  source 1..20: mol_type = other RNA
ccgtcctggcagggctgtgg

SEQ ID NO: 10578 - RNA, 20 nt, synthetic construct
  source 1..20: mol_type = other RNA
ccgtctggtgcgtttcactg

SEQ ID NO: 10579 - RNA, 20 nt, synthetic construct
  source 1..20: mol_type = other RNA
ccgtgcagagggggcctcag

SEQ ID NO: 10580 - RNA, 20 nt, synthetic construct
  source 1..20: mol_type = other RNA
ccgtgcgtcagttttacctg

SEQ ID NO: 10581 - RNA, 20 nt, synthetic construct
  source 1..20: mol_type = other RNA
ccgtggatctaggagtttag

SEQ ID NO: 10582 - RNA, 20 nt, synthetic construct
  source 1..20: mol_type = other RNA
ccgtgggcccagggctatgc

SEQ ID NO: 10583 - RNA, 20 nt, synthetic construct
  source 1..20: mol_type = other RNA
ccgtgtcagcccctggctgc

SEQ ID NO: 10584 - RNA, 20 nt, synthetic construct
  source 1..20: mol_type = other RNA
ccgtgtccctggatctgttt

SEQ ID NO: 10585 - RNA, 20 nt, synthetic construct
  source 1..20: mol_type = other RNA
ccgtgtctaacaggtaccat

SEQ ID NO: 10586 - RNA, 20 nt, synthetic construct
  source 1..20: mol_type = other RNA
ccgtgtggaaaactcccttt

SEQ ID NO: 10587 - RNA, 20 nt, synthetic construct
  source 1..20: mol_type = other RNA
ccgttcacttcctgtttgca

SEQ ID NO: 10588 - RNA, 20 nt, synthetic construct
  source 1..20: mol_type = other RNA
ccgttcccagggcacgtgcg

SEQ ID NO: 10589 - RNA, 20 nt, synthetic construct
  source 1..20: mol_type = other RNA
ccgttcccctgcatccccct

SEQ ID NO: 10590 - RNA, 20 nt, synthetic construct
  source 1..20: mol_type = other RNA
ccgttcccctgcatccccgt

SEQ ID NO: 10591 - RNA, 20 nt, synthetic construct
  source 1..20: mol_type = other RNA
ccgtttctcattcttccctt

SEQ ID NO: 10592 - RNA, 20 nt, synthetic construct
  source 1..20: mol_type = other RNA
cctaagaacttgggaacagc

SEQ ID NO: 10593 - RNA, 20 nt, synthetic construct
  source 1..20: mol_type = other RNA
cctaagaatcctggctccag

SEQ ID NO: 10594 - RNA, 20 nt, synthetic construct
  source 1..20: mol_type = other RNA
cctaagacccagaagtccag

SEQ ID NO: 10595 - RNA, 20 nt, synthetic construct
  source 1..20: mol_type = other RNA
cctaaggccctgctctgggc

SEQ ID NO: 10596 - RNA, 20 nt, synthetic construct
  source 1..20: mol_type = other RNA
cctaagggaagaatgagaaa

SEQ ID NO: 10597 - RNA, 20 nt, synthetic construct
  source 1..20: mol_type = other RNA
cctacaggggttcctggctc

SEQ ID NO: 10598 - RNA, 20 nt, synthetic construct
  source 1..20: mol_type = other RNA
cctactctagcccccaaccc

SEQ ID NO: 10599 - RNA, 20 nt, synthetic construct
  source 1..20: mol_type = other RNA
cctacttggcctggacccca

SEQ ID NO: 10600 - RNA, 20 nt, synthetic construct
  source 1..20: mol_type = other RNA
cctagatccacgggataaat

SEQ ID NO: 10601 - RNA, 20 nt, synthetic construct
  source 1..20: mol_type = other RNA
cctagcaccgtgtccctgga

SEQ ID NO: 10602 - RNA, 20 nt, synthetic construct
  source 1..20: mol_type = other RNA
cctagccactaaggcaattg

SEQ ID NO: 10603 - RNA, 20 nt, synthetic construct
  source 1..20: mol_type = other RNA
cctaggaaaacagggatggt

SEQ ID NO: 10604 - RNA, 20 nt, synthetic construct
  source 1..20: mol_type = other RNA
cctaggacgcaccattctca

SEQ ID NO: 10605 - RNA, 20 nt, synthetic construct
  source 1..20: mol_type = other RNA
cctaggactgagggtttcag

SEQ ID NO: 10606 - RNA, 20 nt, synthetic construct
  source 1..20: mol_type = other RNA
cctaggtgttcaccaggtcg

SEQ ID NO: 10607 - RNA, 20 nt, synthetic construct
  source 1..20: mol_type = other RNA
cctagtctgagcactggaag

SEQ ID NO: 10608 - RNA, 20 nt, synthetic construct
  source 1..20: mol_type = other RNA
cctagttttagcactgaaac

SEQ ID NO: 10609 - RNA, 20 nt, synthetic construct
  source 1..20: mol_type = other RNA
cctatcgccatgacaactgg

SEQ ID NO: 10610 - RNA, 20 nt, synthetic construct
  source 1..20: mol_type = other RNA
cctcaccaagtggttgataa

SEQ ID NO: 10611 - RNA, 20 nt, synthetic construct
  source 1..20: mol_type = other RNA
cctcaccacagccctgccag

SEQ ID NO: 10612 - RNA, 20 nt, synthetic construct
  source 1..20: mol_type = other RNA
cctcacctctccaaagctgc

SEQ ID NO: 10613 - RNA, 20 nt, synthetic construct
  source 1..20: mol_type = other RNA
cctcagacccacgagtccag

SEQ ID NO: 10614 - RNA, 20 nt, synthetic construct
  source 1..20: mol_type = other RNA
cctcagatgaaggagtccag

SEQ ID NO: 10615 - RNA, 20 nt, synthetic construct
  source 1..20: mol_type = other RNA
cctcagctccagttcaggtc

SEQ ID NO: 10616 - RNA, 20 nt, synthetic construct
  source 1..20: mol_type = other RNA
cctcaggcatctttcacagg

SEQ ID NO: 10617 - RNA, 20 nt, synthetic construct
  source 1..20: mol_type = other RNA
cctcagtcctaggaaaacag

SEQ ID NO: 10618 - RNA, 20 nt, synthetic construct
  source 1..20: mol_type = other RNA
cctcagtgaactggagtgtg

SEQ ID NO: 10619 - RNA, 20 nt, synthetic construct
  source 1..20: mol_type = other RNA
cctcatgctcttggccctcg

SEQ ID NO: 10620 - RNA, 20 nt, synthetic construct
  source 1..20: mol_type = other RNA
cctccaactgtggggtgact

SEQ ID NO: 10621 - RNA, 20 nt, synthetic construct
  source 1..20: mol_type = other RNA
cctccaccctgcatagccct

SEQ ID NO: 10622 - RNA, 20 nt, synthetic construct
  source 1..20: mol_type = other RNA
cctccagatgggcagctttg

SEQ ID NO: 10623 - RNA, 20 nt, synthetic construct
  source 1..20: mol_type = other RNA
cctccccattcaacccagga

SEQ ID NO: 10624 - RNA, 20 nt, synthetic construct
  source 1..20: mol_type = other RNA
cctcccctatcgccatgaca

SEQ ID NO: 10625 - RNA, 20 nt, synthetic construct
  source 1..20: mol_type = other RNA
cctcccgcctcctccagatg

SEQ ID NO: 10626 - RNA, 20 nt, synthetic construct
  source 1..20: mol_type = other RNA
cctccctaagacccagaagt

SEQ ID NO: 10627 - RNA, 20 nt, synthetic construct
  source 1..20: mol_type = other RNA
cctcccttccccgttcactt

SEQ ID NO: 10628 - RNA, 20 nt, synthetic construct
  source 1..20: mol_type = other RNA
cctccgaccccctggacttc

SEQ ID NO: 10629 - RNA, 20 nt, synthetic construct
  source 1..20: mol_type = other RNA
cctccgcccagagcagggtc

SEQ ID NO: 10630 - RNA, 20 nt, synthetic construct
  source 1..20: mol_type = other RNA
cctccgtgcgtcagttttac

SEQ ID NO: 10631 - RNA, 20 nt, synthetic construct
  source 1..20: mol_type = other RNA
cctcctactctagcccccaa

SEQ ID NO: 10632 - RNA, 20 nt, synthetic construct
  source 1..20: mol_type = other RNA
cctcctcaccacagccctgc

SEQ ID NO: 10633 - RNA, 20 nt, synthetic construct
  source 1..20: mol_type = other RNA
cctcctccagatgggcagct

SEQ ID NO: 10634 - RNA, 20 nt, synthetic construct
  source 1..20: mol_type = other RNA
cctcctccgaccccctggac

SEQ ID NO: 10635 - RNA, 20 nt, synthetic construct
  source 1..20: mol_type = other RNA
cctcctccttcagagccagg

SEQ ID NO: 10636 - RNA, 20 nt, synthetic construct
  source 1..20: mol_type = other RNA
cctcctctctcaaacccagg

SEQ ID NO: 10637 - RNA, 20 nt, synthetic construct
  source 1..20: mol_type = other RNA
cctcctctctgaaccccagc

SEQ ID NO: 10638 - RNA, 20 nt, synthetic construct
  source 1..20: mol_type = other RNA
cctcctgccttaaacccagc

SEQ ID NO: 10639 - RNA, 20 nt, synthetic construct
  source 1..20: mol_type = other RNA
cctcctgggataccccgaag

SEQ ID NO: 10640 - RNA, 20 nt, synthetic construct
  source 1..20: mol_type = other RNA
cctcctgggttgaatgggga

SEQ ID NO: 10641 - RNA, 20 nt, synthetic construct
  source 1..20: mol_type = other RNA
cctccttcagagccaggagt

SEQ ID NO: 10642 - RNA, 20 nt, synthetic construct
  source 1..20: mol_type = other RNA
cctcggacccaggagtccag

SEQ ID NO: 10643 - RNA, 20 nt, synthetic construct
  source 1..20: mol_type = other RNA
cctcgtagctccctcccgcc

SEQ ID NO: 10644 - RNA, 20 nt, synthetic construct
  source 1..20: mol_type = other RNA
cctcgtccaccatctcatgc

SEQ ID NO: 10645 - RNA, 20 nt, synthetic construct
  source 1..20: mol_type = other RNA
cctctactccctttctcttt

SEQ ID NO: 10646 - RNA, 20 nt, synthetic construct
  source 1..20: mol_type = other RNA
cctctccaaagctgcccatc

SEQ ID NO: 10647 - RNA, 20 nt, synthetic construct
  source 1..20: mol_type = other RNA
cctctcccagaacctgagct

SEQ ID NO: 10648 - RNA, 20 nt, synthetic construct
  source 1..20: mol_type = other RNA
cctctccccattcagaccca

SEQ ID NO: 10649 - RNA, 20 nt, synthetic construct
  source 1..20: mol_type = other RNA
cctctcctgggcttgccaag

SEQ ID NO: 10650 - RNA, 20 nt, synthetic construct
  source 1..20: mol_type = other RNA
cctctcgtggggtccaggcc

SEQ ID NO: 10651 - RNA, 20 nt, synthetic construct
  source 1..20: mol_type = other RNA
cctctctcaaacccaggagc

SEQ ID NO: 10652 - RNA, 20 nt, synthetic construct
  source 1..20: mol_type = other RNA
cctctctgaaccccagccca

SEQ ID NO: 10653 - RNA, 20 nt, synthetic construct
  source 1..20: mol_type = other RNA
cctctgcacggggccctgca

SEQ ID NO: 10654 - RNA, 20 nt, synthetic construct
  source 1..20: mol_type = other RNA
cctctggagtcccgacttgc

SEQ ID NO: 10655 - RNA, 20 nt, synthetic construct
  source 1..20: mol_type = other RNA
cctctggccactggctgttt

SEQ ID NO: 10656 - RNA, 20 nt, synthetic construct
  source 1..20: mol_type = other RNA
cctctgggagtcccgcccag

SEQ ID NO: 10657 - RNA, 20 nt, synthetic construct
  source 1..20: mol_type = other RNA
cctctgggggatgcagggga

SEQ ID NO: 10658 - RNA, 20 nt, synthetic construct
  source 1..20: mol_type = other RNA
cctcttccctagtctgagca

SEQ ID NO: 10659 - RNA, 20 nt, synthetic construct
  source 1..20: mol_type = other RNA
cctcttgggaagtgtaagga

SEQ ID NO: 10660 - RNA, 20 nt, synthetic construct
  source 1..20: mol_type = other RNA
cctgaactggagctgaggaa

SEQ ID NO: 10661 - RNA, 20 nt, synthetic construct
  source 1..20: mol_type = other RNA
cctgaccactgggcaaccag

SEQ ID NO: 10662 - RNA, 20 nt, synthetic construct
  source 1..20: mol_type = other RNA
cctgacccaaacccagctcc

SEQ ID NO: 10663 - RNA, 20 nt, synthetic construct
  source 1..20: mol_type = other RNA
cctgagaagggaatccctcc

SEQ ID NO: 10664 - RNA, 20 nt, synthetic construct
  source 1..20: mol_type = other RNA
cctgagcgcctctcctgggc

SEQ ID NO: 10665 - RNA, 20 nt, synthetic construct
  source 1..20: mol_type = other RNA
cctgagctgctctgacgcgg

SEQ ID NO: 10666 - RNA, 20 nt, synthetic construct
  source 1..20: mol_type = other RNA
cctgaggcctgggcaccagg

SEQ ID NO: 10667 - RNA, 20 nt, synthetic construct
  source 1..20: mol_type = other RNA
cctgagtctgtcccagcaca

SEQ ID NO: 10668 - RNA, 20 nt, synthetic construct
  source 1..20: mol_type = other RNA
cctgagttctaactttggct

SEQ ID NO: 10669 - RNA, 20 nt, synthetic construct
  source 1..20: mol_type = other RNA
cctgcaccccaattgcctta

SEQ ID NO: 10670 - RNA, 20 nt, synthetic construct
  source 1..20: mol_type = other RNA
cctgcagagtatctgctggg

SEQ ID NO: 10671 - RNA, 20 nt, synthetic construct
  source 1..20: mol_type = other RNA
cctgcagccaggggctgaca

SEQ ID NO: 10672 - RNA, 20 nt, synthetic construct
  source 1..20: mol_type = other RNA
cctgcatagccctgggccca

SEQ ID NO: 10673 - RNA, 20 nt, synthetic construct
  source 1..20: mol_type = other RNA
cctgcatcccccagaggccc

SEQ ID NO: 10674 - RNA, 20 nt, synthetic construct
  source 1..20: mol_type = other RNA
cctgcatcccccttcccctg

SEQ ID NO: 10675 - RNA, 20 nt, synthetic construct
  source 1..20: mol_type = other RNA
cctgcatccccgttcccctg

SEQ ID NO: 10676 - RNA, 20 nt, synthetic construct
  source 1..20: mol_type = other RNA
cctgcatccttctccaggca

SEQ ID NO: 10677 - RNA, 20 nt, synthetic construct
  source 1..20: mol_type = other RNA
cctgccaggacggggctggc

SEQ ID NO: 10678 - RNA, 20 nt, synthetic construct
  source 1..20: mol_type = other RNA
cctgcccagtacaggcatcc

SEQ ID NO: 10679 - RNA, 20 nt, synthetic construct
  source 1..20: mol_type = other RNA
cctgcccccattcctgcacc

SEQ ID NO: 10680 - RNA, 20 nt, synthetic construct
  source 1..20: mol_type = other RNA
cctgccccttccctacaggg

SEQ ID NO: 10681 - RNA, 20 nt, synthetic construct
  source 1..20: mol_type = other RNA
cctgcccggttctcagtggc

SEQ ID NO: 10682 - RNA, 20 nt, synthetic construct
  source 1..20: mol_type = other RNA
cctgcctggagaaggatgca

SEQ ID NO: 10683 - RNA, 20 nt, synthetic construct
  source 1..20: mol_type = other RNA
cctgccttaaacccagccag

SEQ ID NO: 10684 - RNA, 20 nt, synthetic construct
  source 1..20: mol_type = other RNA
cctgcgctaccctctcccag

SEQ ID NO: 10685 - RNA, 20 nt, synthetic construct
  source 1..20: mol_type = other RNA
cctgctctgggcggaggaat

SEQ ID NO: 10686 - RNA, 20 nt, synthetic construct
  source 1..20: mol_type = other RNA
cctgctctgggcttctgggt

SEQ ID NO: 10687 - RNA, 20 nt, synthetic construct
  source 1..20: mol_type = other RNA
cctgctgtggctgttcccaa

SEQ ID NO: 10688 - RNA, 20 nt, synthetic construct
  source 1..20: mol_type = other RNA
cctgcttcttggccacgtaa

SEQ ID NO: 10689 - RNA, 20 nt, synthetic construct
  source 1..20: mol_type = other RNA
cctggaccccacgagaggcc

SEQ ID NO: 10690 - RNA, 20 nt, synthetic construct
  source 1..20: mol_type = other RNA
cctggacccctgggtctgaa

SEQ ID NO: 10691 - RNA, 20 nt, synthetic construct
  source 1..20: mol_type = other RNA
cctggactccttcatctgag

SEQ ID NO: 10692 - RNA, 20 nt, synthetic construct
  source 1..20: mol_type = other RNA
cctggactctggagtccctg

SEQ ID NO: 10693 - RNA, 20 nt, synthetic construct
  source 1..20: mol_type = other RNA
cctggacttcggcttttgtc

SEQ ID NO: 10694 - RNA, 20 nt, synthetic construct
  source 1..20: mol_type = other RNA
cctggacttctgggtcttag

SEQ ID NO: 10695 - RNA, 20 nt, synthetic construct
  source 1..20: mol_type = other RNA
cctggagaaggatgcaggac

SEQ ID NO: 10696 - RNA, 20 nt, synthetic construct
  source 1..20: mol_type = other RNA
cctggagcattggggtgggc

SEQ ID NO: 10697 - RNA, 20 nt, synthetic construct
  source 1..20: mol_type = other RNA
cctggatctgttttcgtggc

SEQ ID NO: 10698 - RNA, 20 nt, synthetic construct
  source 1..20: mol_type = other RNA
cctggcagggctgtggtgag

SEQ ID NO: 10699 - RNA, 20 nt, synthetic construct
  source 1..20: mol_type = other RNA
cctggcccccagcccctcct

SEQ ID NO: 10700 - RNA, 20 nt, synthetic construct
  source 1..20: mol_type = other RNA
cctggccggcctgaccactg

SEQ ID NO: 10701 - RNA, 20 nt, synthetic construct
  source 1..20: mol_type = other RNA
cctggcctcctgggttgaat

SEQ ID NO: 10702 - RNA, 20 nt, synthetic construct
  source 1..20: mol_type = other RNA
cctggctatctgcaaacagg

SEQ ID NO: 10703 - RNA, 20 nt, synthetic construct
  source 1..20: mol_type = other RNA
cctggctccagcccctccta

SEQ ID NO: 10704 - RNA, 20 nt, synthetic construct
  source 1..20: mol_type = other RNA
cctggctctcctgccccttc

SEQ ID NO: 10705 - RNA, 20 nt, synthetic construct
  source 1..20: mol_type = other RNA
cctggctctgaaggaggagg

SEQ ID NO: 10706 - RNA, 20 nt, synthetic construct
  source 1..20: mol_type = other RNA
cctggctctgctcttcagac

SEQ ID NO: 10707 - RNA, 20 nt, synthetic construct
  source 1..20: mol_type = other RNA
cctggctgcagggccccgtg

SEQ ID NO: 10708 - RNA, 20 nt, synthetic construct
  source 1..20: mol_type = other RNA
cctggctgggtttaaggcag

SEQ ID NO: 10709 - RNA, 20 nt, synthetic construct
  source 1..20: mol_type = other RNA
cctgggaacgggatgaactc

SEQ ID NO: 10710 - RNA, 20 nt, synthetic construct
  source 1..20: mol_type = other RNA
cctgggataccccgaagagt

SEQ ID NO: 10711 - RNA, 20 nt, synthetic construct
  source 1..20: mol_type = other RNA
cctgggcaaacagcataagc

SEQ ID NO: 10712 - RNA, 20 nt, synthetic construct
  source 1..20: mol_type = other RNA
cctgggcaccagggactcca

SEQ ID NO: 10713 - RNA, 20 nt, synthetic construct
  source 1..20: mol_type = other RNA
cctgggcccacggcttcgtt

SEQ ID NO: 10714 - RNA, 20 nt, synthetic construct
  source 1..20: mol_type = other RNA
cctgggccccaggctgtcac

SEQ ID NO: 10715 - RNA, 20 nt, synthetic construct
  source 1..20: mol_type = other RNA
cctgggcgggactcccagag

SEQ ID NO: 10716 - RNA, 20 nt, synthetic construct
  source 1..20: mol_type = other RNA
cctgggctcctgggtttgag

SEQ ID NO: 10717 - RNA, 20 nt, synthetic construct
  source 1..20: mol_type = other RNA
cctgggcttgccaaggactc

SEQ ID NO: 10718 - RNA, 20 nt, synthetic construct
  source 1..20: mol_type = other RNA
cctggggcaagtccctcctc

SEQ ID NO: 10719 - RNA, 20 nt, synthetic construct
  source 1..20: mol_type = other RNA
cctggggcccaggcacacag

SEQ ID NO: 10720 - RNA, 20 nt, synthetic construct
  source 1..20: mol_type = other RNA
cctggggcctctgggggatg

SEQ ID NO: 10721 - RNA, 20 nt, synthetic construct
  source 1..20: mol_type = other RNA
cctggggctgtgtttctcgt

SEQ ID NO: 10722 - RNA, 20 nt, synthetic construct
  source 1..20: mol_type = other RNA
cctgggtctgaatggggaga

SEQ ID NO: 10723 - RNA, 20 nt, synthetic construct
  source 1..20: mol_type = other RNA
cctgggtctgagggtggagg

SEQ ID NO: 10724 - RNA, 20 nt, synthetic construct
  source 1..20: mol_type = other RNA
cctgggttgaatggggaggg

SEQ ID NO: 10725 - RNA, 20 nt, synthetic construct
  source 1..20: mol_type = other RNA
cctgggtttgagagaggagg

SEQ ID NO: 10726 - RNA, 20 nt, synthetic construct
  source 1..20: mol_type = other RNA
cctggtagacagggctgggg

SEQ ID NO: 10727 - RNA, 20 nt, synthetic construct
  source 1..20: mol_type = other RNA
cctggtgaacacctaggacg

SEQ ID NO: 10728 - RNA, 20 nt, synthetic construct
  source 1..20: mol_type = other RNA
cctggtgcccaggcctcagg

SEQ ID NO: 10729 - RNA, 20 nt, synthetic construct
  source 1..20: mol_type = other RNA
cctggtgctgcagcttcctt

SEQ ID NO: 10730 - RNA, 20 nt, synthetic construct
  source 1..20: mol_type = other RNA
cctggttgcccagtggtcag

SEQ ID NO: 10731 - RNA, 20 nt, synthetic construct
  source 1..20: mol_type = other RNA
cctgtactgggcaggtcctt

SEQ ID NO: 10732 - RNA, 20 nt, synthetic construct
  source 1..20: mol_type = other RNA
cctgtagggaaggggcagga

SEQ ID NO: 10733 - RNA, 20 nt, synthetic construct
  source 1..20: mol_type = other RNA
cctgtcccccttcctcgtcc

SEQ ID NO: 10734 - RNA, 20 nt, synthetic construct
  source 1..20: mol_type = other RNA
cctgtctaccaggctgcctt

SEQ ID NO: 10735 - RNA, 20 nt, synthetic construct
  source 1..20: mol_type = other RNA
cctgtgaaagatgcctgagg

SEQ ID NO: 10736 - RNA, 20 nt, synthetic construct
  source 1..20: mol_type = other RNA
cctgtgagataaggccagta

SEQ ID NO: 10737 - RNA, 20 nt, synthetic construct
  source 1..20: mol_type = other RNA
cctgtgctgggacagactca

SEQ ID NO: 10738 - RNA, 20 nt, synthetic construct
  source 1..20: mol_type = other RNA
cctgtgggtggtgacggggg

SEQ ID NO: 10739 - RNA, 20 nt, synthetic construct
  source 1..20: mol_type = other RNA
cctgtgtgcctgggccccag

SEQ ID NO: 10740 - RNA, 20 nt, synthetic construct
  source 1..20: mol_type = other RNA
cctgttagacacggcaaaac

SEQ ID NO: 10741 - RNA, 20 nt, synthetic construct
  source 1..20: mol_type = other RNA
cctgtttgcagatagccagg

SEQ ID NO: 10742 - RNA, 20 nt, synthetic construct
  source 1..20: mol_type = other RNA
cctgttttcctaggactgag

SEQ ID NO: 10743 - RNA, 20 nt, synthetic construct
  source 1..20: mol_type = other RNA
ccttaaacccagccaggtcc

SEQ ID NO: 10744 - RNA, 20 nt, synthetic construct
  source 1..20: mol_type = other RNA
ccttaaagagtccccagtgc

SEQ ID NO: 10745 - RNA, 20 nt, synthetic construct
  source 1..20: mol_type = other RNA
ccttacacttcccaagagga

SEQ ID NO: 10746 - RNA, 20 nt, synthetic construct
  source 1..20: mol_type = other RNA
ccttagggaagcgggaccct

SEQ ID NO: 10747 - RNA, 20 nt, synthetic construct
  source 1..20: mol_type = other RNA
ccttaggggtccaaaacttg

SEQ ID NO: 10748 - RNA, 20 nt, synthetic construct
  source 1..20: mol_type = other RNA
ccttagtggctagggggttg

SEQ ID NO: 10749 - RNA, 20 nt, synthetic construct
  source 1..20: mol_type = other RNA
ccttatctcacaggtaaaac

SEQ ID NO: 10750 - RNA, 20 nt, synthetic construct
  source 1..20: mol_type = other RNA
ccttcacagcccgagtttcc

SEQ ID NO: 10751 - RNA, 20 nt, synthetic construct
  source 1..20: mol_type = other RNA
ccttcagagccaggagtcct

SEQ ID NO: 10752 - RNA, 20 nt, synthetic construct
  source 1..20: mol_type = other RNA
ccttcagtgctcagtggaaa

SEQ ID NO: 10753 - RNA, 20 nt, synthetic construct
  source 1..20: mol_type = other RNA
ccttcatctgagggcggaag

SEQ ID NO: 10754 - RNA, 20 nt, synthetic construct
  source 1..20: mol_type = other RNA
ccttccaagggtcaagctcg

SEQ ID NO: 10755 - RNA, 20 nt, synthetic construct
  source 1..20: mol_type = other RNA
ccttccccgttcacttcctg

SEQ ID NO: 10756 - RNA, 20 nt, synthetic construct
  source 1..20: mol_type = other RNA
ccttcccctgcatcccccag

SEQ ID NO: 10757 - RNA, 20 nt, synthetic construct
  source 1..20: mol_type = other RNA
ccttccctacaggggttcct

SEQ ID NO: 10758 - RNA, 20 nt, synthetic construct
  source 1..20: mol_type = other RNA
ccttccgccctcagatgaag

SEQ ID NO: 10759 - RNA, 20 nt, synthetic construct
  source 1..20: mol_type = other RNA
ccttcctcagctccagttca

SEQ ID NO: 10760 - RNA, 20 nt, synthetic construct
  source 1..20: mol_type = other RNA
ccttcctccaccctgcatag

SEQ ID NO: 10761 - RNA, 20 nt, synthetic construct
  source 1..20: mol_type = other RNA
ccttcctcgtccaccatctc

SEQ ID NO: 10762 - RNA, 20 nt, synthetic construct
  source 1..20: mol_type = other RNA
ccttctcaggttacgtggcc

SEQ ID NO: 10763 - RNA, 20 nt, synthetic construct
  source 1..20: mol_type = other RNA
ccttctccaggcaggtcccc

SEQ ID NO: 10764 - RNA, 20 nt, synthetic construct
  source 1..20: mol_type = other RNA
ccttctttccttaaagagtc

SEQ ID NO: 10765 - RNA, 20 nt, synthetic construct
  source 1..20: mol_type = other RNA
ccttgaaagggaaaggccca

SEQ ID NO: 10766 - RNA, 20 nt, synthetic construct
  source 1..20: mol_type = other RNA
ccttgcccccctcccctatc

SEQ ID NO: 10767 - RNA, 20 nt, synthetic construct
  source 1..20: mol_type = other RNA
ccttggaaggacctggctgg

SEQ ID NO: 10768 - RNA, 20 nt, synthetic construct
  source 1..20: mol_type = other RNA
ccttggcaagcccaggagag

SEQ ID NO: 10769 - RNA, 20 nt, synthetic construct
  source 1..20: mol_type = other RNA
ccttgtggacactgggtggg

SEQ ID NO: 10770 - RNA, 20 nt, synthetic construct
  source 1..20: mol_type = other RNA
cctttcaaggacctgcccag

SEQ ID NO: 10771 - RNA, 20 nt, synthetic construct
  source 1..20: mol_type = other RNA
cctttccctttcaaggacct

SEQ ID NO: 10772 - RNA, 20 nt, synthetic construct
  source 1..20: mol_type = other RNA
cctttcgtggtttccactga

SEQ ID NO: 10773 - RNA, 20 nt, synthetic construct
  source 1..20: mol_type = other RNA
cctttctagtccccaattta

SEQ ID NO: 10774 - RNA, 20 nt, synthetic construct
  source 1..20: mol_type = other RNA
cctttctctttctccatcct

SEQ ID NO: 10775 - RNA, 20 nt, synthetic construct
  source 1..20: mol_type = other RNA
cctttgtgagaatggtgcgt

SEQ ID NO: 10776 - RNA, 20 nt, synthetic construct
  source 1..20: mol_type = other RNA
ccttttgggtggattctcct

SEQ ID NO: 10777 - RNA, 20 nt, synthetic construct
  source 1..20: mol_type = other RNA
cgaaaacagatccagggaca

SEQ ID NO: 10778 - RNA, 20 nt, synthetic construct
  source 1..20: mol_type = other RNA
cgaaaggactcctggctatc

SEQ ID NO: 10779 - RNA, 20 nt, synthetic construct
  source 1..20: mol_type = other RNA
cgaagagtgagtttgccaag

SEQ ID NO: 10780 - RNA, 20 nt, synthetic construct
  source 1..20: mol_type = other RNA
cgaagccgtgggcccagggc

SEQ ID NO: 10781 - RNA, 20 nt, synthetic construct
  source 1..20: mol_type = other RNA
cgaagtccagggggtcggag

SEQ ID NO: 10782 - RNA, 20 nt, synthetic construct
  source 1..20: mol_type = other RNA
cgaccccctggacttcggct

SEQ ID NO: 10783 - RNA, 20 nt, synthetic construct
  source 1..20: mol_type = other RNA
cgacctggtgaacacctagg

SEQ ID NO: 10784 - RNA, 20 nt, synthetic construct
  source 1..20: mol_type = other RNA
cgagaaacacagccccaggt

SEQ ID NO: 10785 - RNA, 20 nt, synthetic construct
  source 1..20: mol_type = other RNA
cgagaggccaccccagccct

SEQ ID NO: 10786 - RNA, 20 nt, synthetic construct
  source 1..20: mol_type = other RNA
cgagccgagttcatcccgtt

SEQ ID NO: 10787 - RNA, 20 nt, synthetic construct
  source 1..20: mol_type = other RNA
cgagcttgacccttggaagg

SEQ ID NO: 10788 - RNA, 20 nt, synthetic construct
  source 1..20: mol_type = other RNA
cgaggaagggggacagggaa

SEQ ID NO: 10789 - RNA, 20 nt, synthetic construct
  source 1..20: mol_type = other RNA
cgagggccaagagcatgagg

SEQ ID NO: 10790 - RNA, 20 nt, synthetic construct
  source 1..20: mol_type = other RNA
cgagtccaggccccagcccc

SEQ ID NO: 10791 - RNA, 20 nt, synthetic construct
  source 1..20: mol_type = other RNA
cgagttcatcccgttcccag

SEQ ID NO: 10792 - RNA, 20 nt, synthetic construct
  source 1..20: mol_type = other RNA
cgagtttccatgacctcatg

SEQ ID NO: 10793 - RNA, 20 nt, synthetic construct
  source 1..20: mol_type = other RNA
cgataggggaggggggcaag

SEQ ID NO: 10794 - RNA, 20 nt, synthetic construct
  source 1..20: mol_type = other RNA
cgatgcttggggacctgcct

SEQ ID NO: 10795 - RNA, 20 nt, synthetic construct
  source 1..20: mol_type = other RNA
cgcaccagacggccgcgtca

SEQ ID NO: 10796 - RNA, 20 nt, synthetic construct
  source 1..20: mol_type = other RNA
cgcaccattctcacaaaggg

SEQ ID NO: 10797 - RNA, 20 nt, synthetic construct
  source 1..20: mol_type = other RNA
cgcacccagatgagaagccc

SEQ ID NO: 10798 - RNA, 20 nt, synthetic construct
  source 1..20: mol_type = other RNA
cgcacggaggaacaatataa

SEQ ID NO: 10799 - RNA, 20 nt, synthetic construct
  source 1..20: mol_type = other RNA
cgcacgtgccctgggaacgg

SEQ ID NO: 10800 - RNA, 20 nt, synthetic construct
  source 1..20: mol_type = other RNA
cgcagggtggccactgagaa

SEQ ID NO: 10801 - RNA, 20 nt, synthetic construct
  source 1..20: mol_type = other RNA
cgccacctgtgggtggtgac

SEQ ID NO: 10802 - RNA, 20 nt, synthetic construct
  source 1..20: mol_type = other RNA
cgccatgacaactgggtgga

SEQ ID NO: 10803 - RNA, 20 nt, synthetic construct
  source 1..20: mol_type = other RNA
cgcccagagcagggtcccgc

SEQ ID NO: 10804 - RNA, 20 nt, synthetic construct
  source 1..20: mol_type = other RNA
cgcccaggcccctgagtctg

SEQ ID NO: 10805 - RNA, 20 nt, synthetic construct
  source 1..20: mol_type = other RNA
cgcccccctgctgtggctgt

SEQ ID NO: 10806 - RNA, 20 nt, synthetic construct
  source 1..20: mol_type = other RNA
cgccctcagatgaaggagtc

SEQ ID NO: 10807 - RNA, 20 nt, synthetic construct
  source 1..20: mol_type = other RNA
cgcctccctaagacccagaa

SEQ ID NO: 10808 - RNA, 20 nt, synthetic construct
  source 1..20: mol_type = other RNA
cgcctcctccagatgggcag

SEQ ID NO: 10809 - RNA, 20 nt, synthetic construct
  source 1..20: mol_type = other RNA
cgcctctactccctttctct

SEQ ID NO: 10810 - RNA, 20 nt, synthetic construct
  source 1..20: mol_type = other RNA
cgcctctcctgggcttgcca

SEQ ID NO: 10811 - RNA, 20 nt, synthetic construct
  source 1..20: mol_type = other RNA
cgcctggttgcccagtggtc

SEQ ID NO: 10812 - RNA, 20 nt, synthetic construct
  source 1..20: mol_type = other RNA
cgcggccgtctggtgcgttt

SEQ ID NO: 10813 - RNA, 20 nt, synthetic construct
  source 1..20: mol_type = other RNA
cgcgtcagagcagctcaggt

SEQ ID NO: 10814 - RNA, 20 nt, synthetic construct
  source 1..20: mol_type = other RNA
cgctaccctctcccagaacc

SEQ ID NO: 10815 - RNA, 20 nt, synthetic construct
  source 1..20: mol_type = other RNA
cgctcaggcttccctgtccc

SEQ ID NO: 10816 - RNA, 20 nt, synthetic construct
  source 1..20: mol_type = other RNA
cgcttccagtgctcagacta

SEQ ID NO: 10817 - RNA, 20 nt, synthetic construct
  source 1..20: mol_type = other RNA
cgcttccctaaggccctgct

SEQ ID NO: 10818 - RNA, 20 nt, synthetic construct
  source 1..20: mol_type = other RNA
cggaaaccaccccagcagat

SEQ ID NO: 10819 - RNA, 20 nt, synthetic construct
  source 1..20: mol_type = other RNA
cggaagggctggggcctggc

SEQ ID NO: 10820 - RNA, 20 nt, synthetic construct
  source 1..20: mol_type = other RNA
cggacacccccctcctcacc

SEQ ID NO: 10821 - RNA, 20 nt, synthetic construct
  source 1..20: mol_type = other RNA
cggacccaggagtccaggcc

SEQ ID NO: 10822 - RNA, 20 nt, synthetic construct
  source 1..20: mol_type = other RNA
cggagcccacccagtgtcca

SEQ ID NO: 10823 - RNA, 20 nt, synthetic construct
  source 1..20: mol_type = other RNA
cggaggaacaatataaattg

SEQ ID NO: 10824 - RNA, 20 nt, synthetic construct
  source 1..20: mol_type = other RNA
cggaggaatatgtcccagat

SEQ ID NO: 10825 - RNA, 20 nt, synthetic construct
  source 1..20: mol_type = other RNA
cggaggagggacttgcccca

SEQ ID NO: 10826 - RNA, 20 nt, synthetic construct
  source 1..20: mol_type = other RNA
cggcaaaacccccgtcacca

SEQ ID NO: 10827 - RNA, 20 nt, synthetic construct
  source 1..20: mol_type = other RNA
cggccacgacctggtgaaca

SEQ ID NO: 10828 - RNA, 20 nt, synthetic construct
  source 1..20: mol_type = other RNA
cggccaggccttcagtgctc

SEQ ID NO: 10829 - RNA, 20 nt, synthetic construct
  source 1..20: mol_type = other RNA
cggccagtttctccacctgg

SEQ ID NO: 10830 - RNA, 20 nt, synthetic construct
  source 1..20: mol_type = other RNA
cggccccttcacagcccgag

SEQ ID NO: 10831 - RNA, 20 nt, synthetic construct
  source 1..20: mol_type = other RNA
cggccgcgtcagagcagctc

SEQ ID NO: 10832 - RNA, 20 nt, synthetic construct
  source 1..20: mol_type = other RNA
cggccgtctggtgcgtttca

SEQ ID NO: 10833 - RNA, 20 nt, synthetic construct
  source 1..20: mol_type = other RNA
cggcctgaccactgggcaac

SEQ ID NO: 10834 - RNA, 20 nt, synthetic construct
  source 1..20: mol_type = other RNA
cggctcgtttatttccaccc

SEQ ID NO: 10835 - RNA, 20 nt, synthetic construct
  source 1..20: mol_type = other RNA
cggcttcgttcctgcagagt

SEQ ID NO: 10836 - RNA, 20 nt, synthetic construct
  source 1..20: mol_type = other RNA
cggcttttgtccccccaagt

SEQ ID NO: 10837 - RNA, 20 nt, synthetic construct
  source 1..20: mol_type = other RNA
cgggaaccccacatggtacc

SEQ ID NO: 10838 - RNA, 20 nt, synthetic construct
  source 1..20: mol_type = other RNA
cgggaatcaagagtcaccca

SEQ ID NO: 10839 - RNA, 20 nt, synthetic construct
  source 1..20: mol_type = other RNA
cgggaccctgctctgggcgg

SEQ ID NO: 10840 - RNA, 20 nt, synthetic construct
  source 1..20: mol_type = other RNA
cgggacctgaactggagctg

SEQ ID NO: 10841 - RNA, 20 nt, synthetic construct
  source 1..20: mol_type = other RNA
cgggactccagagggagcca

SEQ ID NO: 10842 - RNA, 20 nt, synthetic construct
  source 1..20: mol_type = other RNA
cgggactcccagaggggtga

SEQ ID NO: 10843 - RNA, 20 nt, synthetic construct
  source 1..20: mol_type = other RNA
cgggagggagctacgagggc

SEQ ID NO: 10844 - RNA, 20 nt, synthetic construct
  source 1..20: mol_type = other RNA
cgggataaattaccccccaa

SEQ ID NO: 10845 - RNA, 20 nt, synthetic construct
  source 1..20: mol_type = other RNA
cgggatgaactcggctcgtt

SEQ ID NO: 10846 - RNA, 20 nt, synthetic construct
  source 1..20: mol_type = other RNA
cgggccaccgtttctcattc

SEQ ID NO: 10847 - RNA, 20 nt, synthetic construct
  source 1..20: mol_type = other RNA
cgggctgtgaaggggccgca

SEQ ID NO: 10848 - RNA, 20 nt, synthetic construct
  source 1..20: mol_type = other RNA
cggggaagggagggggcttc

SEQ ID NO: 10849 - RNA, 20 nt, synthetic construct
  source 1..20: mol_type = other RNA
cggggatgcaggggaacggg

SEQ ID NO: 10850 - RNA, 20 nt, synthetic construct
  source 1..20: mol_type = other RNA
cggggccctgcagccagggg

SEQ ID NO: 10851 - RNA, 20 nt, synthetic construct
  source 1..20: mol_type = other RNA
cggggctcagtctgaagagc

SEQ ID NO: 10852 - RNA, 20 nt, synthetic construct
  source 1..20: mol_type = other RNA
cggggctggctactggcctt

SEQ ID NO: 10853 - RNA, 20 nt, synthetic construct
  source 1..20: mol_type = other RNA
cggggctgggcctggacccc

SEQ ID NO: 10854 - RNA, 20 nt, synthetic construct
  source 1..20: mol_type = other RNA
cgggggttttgccgtgtcta

SEQ ID NO: 10855 - RNA, 20 nt, synthetic construct
  source 1..20: mol_type = other RNA
cggggtatcccaggaggcct

SEQ ID NO: 10856 - RNA, 20 nt, synthetic construct
  source 1..20: mol_type = other RNA
cggtgctaggacagtgggga

SEQ ID NO: 10857 - RNA, 20 nt, synthetic construct
  source 1..20: mol_type = other RNA
cggtggcccgtgtcagcccc

SEQ ID NO: 10858 - RNA, 20 nt, synthetic construct
  source 1..20: mol_type = other RNA
cggtgtcccagcaagtcggg

SEQ ID NO: 10859 - RNA, 20 nt, synthetic construct
  source 1..20: mol_type = other RNA
cggttctcagtggccaccct

SEQ ID NO: 10860 - RNA, 20 nt, synthetic construct
  source 1..20: mol_type = other RNA
cgtaacctgagaagggaatc

SEQ ID NO: 10861 - RNA, 20 nt, synthetic construct
  source 1..20: mol_type = other RNA
cgtagctccctcccgcctcc

SEQ ID NO: 10862 - RNA, 20 nt, synthetic construct
  source 1..20: mol_type = other RNA
cgtatcttaaacagccagtg

SEQ ID NO: 10863 - RNA, 20 nt, synthetic construct
  source 1..20: mol_type = other RNA
cgtcaccacccacaggtggc

SEQ ID NO: 10864 - RNA, 20 nt, synthetic construct
  source 1..20: mol_type = other RNA
cgtcagagcagctcaggttc

SEQ ID NO: 10865 - RNA, 20 nt, synthetic construct
  source 1..20: mol_type = other RNA
cgtcagttttacctgtgaga

SEQ ID NO: 10866 - RNA, 20 nt, synthetic construct
  source 1..20: mol_type = other RNA
cgtccaccatctcatgcccc

SEQ ID NO: 10867 - RNA, 20 nt, synthetic construct
  source 1..20: mol_type = other RNA
cgtcctaggtgttcaccagg

SEQ ID NO: 10868 - RNA, 20 nt, synthetic construct
  source 1..20: mol_type = other RNA
cgtcctgcatccttctccag

SEQ ID NO: 10869 - RNA, 20 nt, synthetic construct
  source 1..20: mol_type = other RNA
cgtcctggcagggctgtggt

SEQ ID NO: 10870 - RNA, 20 nt, synthetic construct
  source 1..20: mol_type = other RNA
cgtctggtgcgtttcactga

SEQ ID NO: 10871 - RNA, 20 nt, synthetic construct
  source 1..20: mol_type = other RNA
cgtgacctgcccggttctca

SEQ ID NO: 10872 - RNA, 20 nt, synthetic construct
  source 1..20: mol_type = other RNA
cgtgcagagggggcctcagt

SEQ ID NO: 10873 - RNA, 20 nt, synthetic construct
  source 1..20: mol_type = other RNA
cgtgccctgggaacgggatg

SEQ ID NO: 10874 - RNA, 20 nt, synthetic construct
  source 1..20: mol_type = other RNA
cgtgcggccccttcacagcc

SEQ ID NO: 10875 - RNA, 20 nt, synthetic construct
  source 1..20: mol_type = other RNA
cgtgcgtcagttttacctgt

SEQ ID NO: 10876 - RNA, 20 nt, synthetic construct
  source 1..20: mol_type = other RNA
cgtggatctaggagtttagc

SEQ ID NO: 10877 - RNA, 20 nt, synthetic construct
  source 1..20: mol_type = other RNA
cgtggccaagaagcagggga

SEQ ID NO: 10878 - RNA, 20 nt, synthetic construct
  source 1..20: mol_type = other RNA
cgtggccgcctctactccct

SEQ ID NO: 10879 - RNA, 20 nt, synthetic construct
  source 1..20: mol_type = other RNA
cgtggctccctctggagtcc

SEQ ID NO: 10880 - RNA, 20 nt, synthetic construct
  source 1..20: mol_type = other RNA
cgtgggcccagggctatgca

SEQ ID NO: 10881 - RNA, 20 nt, synthetic construct
  source 1..20: mol_type = other RNA
cgtggggtaccctaagaact

SEQ ID NO: 10882 - RNA, 20 nt, synthetic construct
  source 1..20: mol_type = other RNA
cgtggggtccaggccaagta

SEQ ID NO: 10883 - RNA, 20 nt, synthetic construct
  source 1..20: mol_type = other RNA
cgtgggtttatcaaccactt

SEQ ID NO: 10884 - RNA, 20 nt, synthetic construct
  source 1..20: mol_type = other RNA
cgtggtttccactgagcact

SEQ ID NO: 10885 - RNA, 20 nt, synthetic construct
  source 1..20: mol_type = other RNA
cgtgtcagcccctggctgca

SEQ ID NO: 10886 - RNA, 20 nt, synthetic construct
  source 1..20: mol_type = other RNA
cgtgtccctggatctgtttt

SEQ ID NO: 10887 - RNA, 20 nt, synthetic construct
  source 1..20: mol_type = other RNA
cgtgtctaacaggtaccatg

SEQ ID NO: 10888 - RNA, 20 nt, synthetic construct
  source 1..20: mol_type = other RNA
cgtgtggaaaactccctttg

SEQ ID NO: 10889 - RNA, 20 nt, synthetic construct
  source 1..20: mol_type = other RNA
cgttcacttcctgtttgcag

SEQ ID NO: 10890 - RNA, 20 nt, synthetic construct
  source 1..20: mol_type = other RNA
cgttcccagggcacgtgcgg

SEQ ID NO: 10891 - RNA, 20 nt, synthetic construct
  source 1..20: mol_type = other RNA
cgttcccctgcatccccctt

SEQ ID NO: 10892 - RNA, 20 nt, synthetic construct
  source 1..20: mol_type = other RNA
cgttcccctgcatccccgtt

SEQ ID NO: 10893 - RNA, 20 nt, synthetic construct
  source 1..20: mol_type = other RNA
cgttcctgcagagtatctgc

SEQ ID NO: 10894 - RNA, 20 nt, synthetic construct
  source 1..20: mol_type = other RNA
cgtttatttccacccagttg

SEQ ID NO: 10895 - RNA, 20 nt, synthetic construct
  source 1..20: mol_type = other RNA
cgtttcactgatcctggtgc

SEQ ID NO: 10896 - RNA, 20 nt, synthetic construct
  source 1..20: mol_type = other RNA
cgtttctcattcttccctta

SEQ ID NO: 10897 - RNA, 20 nt, synthetic construct
  source 1..20: mol_type = other RNA
ctaaaactaggctgtcctgg

SEQ ID NO: 10898 - RNA, 20 nt, synthetic construct
  source 1..20: mol_type = other RNA
ctaaactcctagatccacgg

SEQ ID NO: 10899 - RNA, 20 nt, synthetic construct
  source 1..20: mol_type = other RNA
ctaacaggtaccatgtgggg

SEQ ID NO: 10900 - RNA, 20 nt, synthetic construct
  source 1..20: mol_type = other RNA
ctaactttggctcttcacct

SEQ ID NO: 10901 - RNA, 20 nt, synthetic construct
  source 1..20: mol_type = other RNA
ctaagaacttgggaacagcc

SEQ ID NO: 10902 - RNA, 20 nt, synthetic construct
  source 1..20: mol_type = other RNA
ctaagaatcctggctccagc

SEQ ID NO: 10903 - RNA, 20 nt, synthetic construct
  source 1..20: mol_type = other RNA
ctaagacccagaagtccagg

SEQ ID NO: 10904 - RNA, 20 nt, synthetic construct
  source 1..20: mol_type = other RNA
ctaaggcaattggggtgcag

SEQ ID NO: 10905 - RNA, 20 nt, synthetic construct
  source 1..20: mol_type = other RNA
ctaaggccctgctctgggct

SEQ ID NO: 10906 - RNA, 20 nt, synthetic construct
  source 1..20: mol_type = other RNA
ctaagggaagaatgagaaac

SEQ ID NO: 10907 - RNA, 20 nt, synthetic construct
  source 1..20: mol_type = other RNA
ctacaggggttcctggctct

SEQ ID NO: 10908 - RNA, 20 nt, synthetic construct
  source 1..20: mol_type = other RNA
ctaccaggctgccttttggg

SEQ ID NO: 10909 - RNA, 20 nt, synthetic construct
  source 1..20: mol_type = other RNA
ctaccctctcccagaacctg

SEQ ID NO: 10910 - RNA, 20 nt, synthetic construct
  source 1..20: mol_type = other RNA
ctacgagggccaagagcatg

SEQ ID NO: 10911 - RNA, 20 nt, synthetic construct
  source 1..20: mol_type = other RNA
ctactccctttctctttctc

SEQ ID NO: 10912 - RNA, 20 nt, synthetic construct
  source 1..20: mol_type = other RNA
ctactctagcccccaacccc

SEQ ID NO: 10913 - RNA, 20 nt, synthetic construct
  source 1..20: mol_type = other RNA
ctactggccttatctcacag

SEQ ID NO: 10914 - RNA, 20 nt, synthetic construct
  source 1..20: mol_type = other RNA
ctacttggcctggaccccac

SEQ ID NO: 10915 - RNA, 20 nt, synthetic construct
  source 1..20: mol_type = other RNA
ctagaaaggtgaagagccaa

SEQ ID NO: 10916 - RNA, 20 nt, synthetic construct
  source 1..20: mol_type = other RNA
ctagagtaggaggggctgga

SEQ ID NO: 10917 - RNA, 20 nt, synthetic construct
  source 1..20: mol_type = other RNA
ctagatccacgggataaatt

SEQ ID NO: 10918 - RNA, 20 nt, synthetic construct
  source 1..20: mol_type = other RNA
ctagcaccgtgtccctggat

SEQ ID NO: 10919 - RNA, 20 nt, synthetic construct
  source 1..20: mol_type = other RNA
ctagccactaaggcaattgg

SEQ ID NO: 10920 - RNA, 20 nt, synthetic construct
  source 1..20: mol_type = other RNA
ctagcccccaaccccctagc

SEQ ID NO: 10921 - RNA, 20 nt, synthetic construct
  source 1..20: mol_type = other RNA
ctaggaaaacagggatggtt

SEQ ID NO: 10922 - RNA, 20 nt, synthetic construct
  source 1..20: mol_type = other RNA
ctaggacagtggggaaaatg

SEQ ID NO: 10923 - RNA, 20 nt, synthetic construct
  source 1..20: mol_type = other RNA
ctaggacgcaccattctcac

SEQ ID NO: 10924 - RNA, 20 nt, synthetic construct
  source 1..20: mol_type = other RNA
ctaggactgagggtttcagt

SEQ ID NO: 10925 - RNA, 20 nt, synthetic construct
  source 1..20: mol_type = other RNA
ctaggagtttagcttcactc

SEQ ID NO: 10926 - RNA, 20 nt, synthetic construct
  source 1..20: mol_type = other RNA
ctaggctgtcctgggcaaac

SEQ ID NO: 10927 - RNA, 20 nt, synthetic construct
  source 1..20: mol_type = other RNA
ctagggaagaggttccagcc

SEQ ID NO: 10928 - RNA, 20 nt, synthetic construct
  source 1..20: mol_type = other RNA
ctagggggttgggggctaga

SEQ ID NO: 10929 - RNA, 20 nt, synthetic construct
  source 1..20: mol_type = other RNA
ctaggtgttcaccaggtcgt

SEQ ID NO: 10930 - RNA, 20 nt, synthetic construct
  source 1..20: mol_type = other RNA
ctagtccccaatttatattg

SEQ ID NO: 10931 - RNA, 20 nt, synthetic construct
  source 1..20: mol_type = other RNA
ctagtctgagcactggaagc

SEQ ID NO: 10932 - RNA, 20 nt, synthetic construct
  source 1..20: mol_type = other RNA
ctagttttagcactgaaacc

SEQ ID NO: 10933 - RNA, 20 nt, synthetic construct
  source 1..20: mol_type = other RNA
ctatcgccatgacaactggg

SEQ ID NO: 10934 - RNA, 20 nt, synthetic construct
  source 1..20: mol_type = other RNA
ctatctgcaaacaggaagtg

SEQ ID NO: 10935 - RNA, 20 nt, synthetic construct
  source 1..20: mol_type = other RNA
ctatctgggacatattcctc

SEQ ID NO: 10936 - RNA, 20 nt, synthetic construct
  source 1..20: mol_type = other RNA
ctatgcagggtggaggaagg

SEQ ID NO: 10937 - RNA, 20 nt, synthetic construct
  source 1..20: mol_type = other RNA
ctcaaacccagaagcccaga

SEQ ID NO: 10938 - RNA, 20 nt, synthetic construct
  source 1..20: mol_type = other RNA
ctcaaacccaggagcccagg

SEQ ID NO: 10939 - RNA, 20 nt, synthetic construct
  source 1..20: mol_type = other RNA
ctcacaaagggagttttcca

SEQ ID NO: 10940 - RNA, 20 nt, synthetic construct
  source 1..20: mol_type = other RNA
ctcacaggtaaaactgacgc

SEQ ID NO: 10941 - RNA, 20 nt, synthetic construct
  source 1..20: mol_type = other RNA
ctcaccaagtggttgataaa

SEQ ID NO: 10942 - RNA, 20 nt, synthetic construct
  source 1..20: mol_type = other RNA
ctcaccacagccctgccagg

SEQ ID NO: 10943 - RNA, 20 nt, synthetic construct
  source 1..20: mol_type = other RNA
ctcacccctctgggagtccc

SEQ ID NO: 10944 - RNA, 20 nt, synthetic construct
  source 1..20: mol_type = other RNA
ctcacctctccaaagctgcc

SEQ ID NO: 10945 - RNA, 20 nt, synthetic construct
  source 1..20: mol_type = other RNA
ctcactcttcggggtatccc

SEQ ID NO: 10946 - RNA, 20 nt, synthetic construct
  source 1..20: mol_type = other RNA
ctcagacccacgagtccagg

SEQ ID NO: 10947 - RNA, 20 nt, synthetic construct
  source 1..20: mol_type = other RNA
ctcagactagggaagaggtt

SEQ ID NO: 10948 - RNA, 20 nt, synthetic construct
  source 1..20: mol_type = other RNA
ctcagatgaaggagtccagg

SEQ ID NO: 10949 - RNA, 20 nt, synthetic construct
  source 1..20: mol_type = other RNA
ctcagctccagttcaggtcc

SEQ ID NO: 10950 - RNA, 20 nt, synthetic construct
  source 1..20: mol_type = other RNA
ctcaggaccaacttattctg

SEQ ID NO: 10951 - RNA, 20 nt, synthetic construct
  source 1..20: mol_type = other RNA
ctcaggcatctttcacaggg

SEQ ID NO: 10952 - RNA, 20 nt, synthetic construct
  source 1..20: mol_type = other RNA
ctcaggcttccctgtccccc

SEQ ID NO: 10953 - RNA, 20 nt, synthetic construct
  source 1..20: mol_type = other RNA
ctcaggggcctgggcgggac

SEQ ID NO: 10954 - RNA, 20 nt, synthetic construct
  source 1..20: mol_type = other RNA
ctcaggttacgtggccaaga

SEQ ID NO: 10955 - RNA, 20 nt, synthetic construct
  source 1..20: mol_type = other RNA
ctcaggttctgggagagggt

SEQ ID NO: 10956 - RNA, 20 nt, synthetic construct
  source 1..20: mol_type = other RNA
ctcagtcctaggaaaacagg

SEQ ID NO: 10957 - RNA, 20 nt, synthetic construct
  source 1..20: mol_type = other RNA
ctcagtctgaagagcagagc

SEQ ID NO: 10958 - RNA, 20 nt, synthetic construct
  source 1..20: mol_type = other RNA
ctcagtgaactggagtgtga

SEQ ID NO: 10959 - RNA, 20 nt, synthetic construct
  source 1..20: mol_type = other RNA
ctcagtggaaaccacgaaag

SEQ ID NO: 10960 - RNA, 20 nt, synthetic construct
  source 1..20: mol_type = other RNA
ctcagtggccaccctgcgct

SEQ ID NO: 10961 - RNA, 20 nt, synthetic construct
  source 1..20: mol_type = other RNA
ctcatctgggtgcgggaacc

SEQ ID NO: 10962 - RNA, 20 nt, synthetic construct
  source 1..20: mol_type = other RNA
ctcatgcccctggctctcct

SEQ ID NO: 10963 - RNA, 20 nt, synthetic construct
  source 1..20: mol_type = other RNA
ctcatgctcttggccctcgt

SEQ ID NO: 10964 - RNA, 20 nt, synthetic construct
  source 1..20: mol_type = other RNA
ctcattcttcccttaggggt

SEQ ID NO: 10965 - RNA, 20 nt, synthetic construct
  source 1..20: mol_type = other RNA
ctccaaagctgcccatctgg

SEQ ID NO: 10966 - RNA, 20 nt, synthetic construct
  source 1..20: mol_type = other RNA
ctccaactgtggggtgactg

SEQ ID NO: 10967 - RNA, 20 nt, synthetic construct
  source 1..20: mol_type = other RNA
ctccaccctgcatagccctg

SEQ ID NO: 10968 - RNA, 20 nt, synthetic construct
  source 1..20: mol_type = other RNA
ctccacctggggctgtgttt

SEQ ID NO: 10969 - RNA, 20 nt, synthetic construct
  source 1..20: mol_type = other RNA
ctccagagggagccacgaaa

SEQ ID NO: 10970 - RNA, 20 nt, synthetic construct
  source 1..20: mol_type = other RNA
ctccagagtccaggcccaac

SEQ ID NO: 10971 - RNA, 20 nt, synthetic construct
  source 1..20: mol_type = other RNA
ctccagatgggcagctttgg

SEQ ID NO: 10972 - RNA, 20 nt, synthetic construct
  source 1..20: mol_type = other RNA
ctccagcccctcctactcta

SEQ ID NO: 10973 - RNA, 20 nt, synthetic construct
  source 1..20: mol_type = other RNA
ctccaggcaggtccccaagc

SEQ ID NO: 10974 - RNA, 20 nt, synthetic construct
  source 1..20: mol_type = other RNA
ctccaggcctcctgggatac

SEQ ID NO: 10975 - RNA, 20 nt, synthetic construct
  source 1..20: mol_type = other RNA
ctccagttcactgaggcccc

SEQ ID NO: 10976 - RNA, 20 nt, synthetic construct
  source 1..20: mol_type = other RNA
ctccagttcaggtcccggag

SEQ ID NO: 10977 - RNA, 20 nt, synthetic construct
  source 1..20: mol_type = other RNA
ctccatccttctttccttaa

SEQ ID NO: 10978 - RNA, 20 nt, synthetic construct
  source 1..20: mol_type = other RNA
ctcccagaacctgagctgct

SEQ ID NO: 10979 - RNA, 20 nt, synthetic construct
  source 1..20: mol_type = other RNA
ctcccagaggggtgagacag

SEQ ID NO: 10980 - RNA, 20 nt, synthetic construct
  source 1..20: mol_type = other RNA
ctccccattcaacccaggag

SEQ ID NO: 10981 - RNA, 20 nt, synthetic construct
  source 1..20: mol_type = other RNA
ctccccattcagacccaggg

SEQ ID NO: 10982 - RNA, 20 nt, synthetic construct
  source 1..20: mol_type = other RNA
ctcccctatcgccatgacaa

SEQ ID NO: 10983 - RNA, 20 nt, synthetic construct
  source 1..20: mol_type = other RNA
ctcccctgcttcttggccac

SEQ ID NO: 10984 - RNA, 20 nt, synthetic construct
  source 1..20: mol_type = other RNA
ctcccgcctcctccagatgg

SEQ ID NO: 10985 - RNA, 20 nt, synthetic construct
  source 1..20: mol_type = other RNA
ctccctaagacccagaagtc

SEQ ID NO: 10986 - RNA, 20 nt, synthetic construct
  source 1..20: mol_type = other RNA
ctccctcccgcctcctccag

SEQ ID NO: 10987 - RNA, 20 nt, synthetic construct
  source 1..20: mol_type = other RNA
ctccctctggagtcccgact

SEQ ID NO: 10988 - RNA, 20 nt, synthetic construct
  source 1..20: mol_type = other RNA
ctcccttccccgttcacttc

SEQ ID NO: 10989 - RNA, 20 nt, synthetic construct
  source 1..20: mol_type = other RNA
ctccctttctctttctccat

SEQ ID NO: 10990 - RNA, 20 nt, synthetic construct
  source 1..20: mol_type = other RNA
ctccctttgtgagaatggtg

SEQ ID NO: 10991 - RNA, 20 nt, synthetic construct
  source 1..20: mol_type = other RNA
ctccgaccccctggacttcg

SEQ ID NO: 10992 - RNA, 20 nt, synthetic construct
  source 1..20: mol_type = other RNA
ctccgcccagagcagggtcc

SEQ ID NO: 10993 - RNA, 20 nt, synthetic construct
  source 1..20: mol_type = other RNA
ctccgggacctgaactggag

SEQ ID NO: 10994 - RNA, 20 nt, synthetic construct
  source 1..20: mol_type = other RNA
ctccgtgcgtcagttttacc

SEQ ID NO: 10995 - RNA, 20 nt, synthetic construct
  source 1..20: mol_type = other RNA
ctcctactctagcccccaac

SEQ ID NO: 10996 - RNA, 20 nt, synthetic construct
  source 1..20: mol_type = other RNA
ctcctagatccacgggataa

SEQ ID NO: 10997 - RNA, 20 nt, synthetic construct
  source 1..20: mol_type = other RNA
ctcctcaccacagccctgcc

SEQ ID NO: 10998 - RNA, 20 nt, synthetic construct
  source 1..20: mol_type = other RNA
ctcctccaactgtggggtga

SEQ ID NO: 10999 - RNA, 20 nt, synthetic construct
  source 1..20: mol_type = other RNA
ctcctccagatgggcagctt

SEQ ID NO: 11000 - RNA, 20 nt, synthetic construct
  source 1..20: mol_type = other RNA
ctcctccgaccccctggact

SEQ ID NO: 11001 - RNA, 20 nt, synthetic construct
  source 1..20: mol_type = other RNA
ctcctccttcagagccagga

SEQ ID NO: 11002 - RNA, 20 nt, synthetic construct
  source 1..20: mol_type = other RNA
ctcctctctcaaacccagga

SEQ ID NO: 11003 - RNA, 20 nt, synthetic construct
  source 1..20: mol_type = other RNA
ctcctctctgaaccccagcc

SEQ ID NO: 11004 - RNA, 20 nt, synthetic construct
  source 1..20: mol_type = other RNA
ctcctcttgggaagtgtaag

SEQ ID NO: 11005 - RNA, 20 nt, synthetic construct
  source 1..20: mol_type = other RNA
ctcctgccccttccctacag

SEQ ID NO: 11006 - RNA, 20 nt, synthetic construct
  source 1..20: mol_type = other RNA
ctcctgccttaaacccagcc

SEQ ID NO: 11007 - RNA, 20 nt, synthetic construct
  source 1..20: mol_type = other RNA
ctcctggctatctgcaaaca

SEQ ID NO: 11008 - RNA, 20 nt, synthetic construct
  source 1..20: mol_type = other RNA
ctcctggctctgaaggagga

SEQ ID NO: 11009 - RNA, 20 nt, synthetic construct
  source 1..20: mol_type = other RNA
ctcctgggataccccgaaga

SEQ ID NO: 11010 - RNA, 20 nt, synthetic construct
  source 1..20: mol_type = other RNA
ctcctgggcttgccaaggac

SEQ ID NO: 11011 - RNA, 20 nt, synthetic construct
  source 1..20: mol_type = other RNA
ctcctgggtctgagggtgga

SEQ ID NO: 11012 - RNA, 20 nt, synthetic construct
  source 1..20: mol_type = other RNA
ctcctgggttgaatggggag

SEQ ID NO: 11013 - RNA, 20 nt, synthetic construct
  source 1..20: mol_type = other RNA
ctcctgggtttgagagagga

SEQ ID NO: 11014 - RNA, 20 nt, synthetic construct
  source 1..20: mol_type = other RNA
ctccttcagagccaggagtc

SEQ ID NO: 11015 - RNA, 20 nt, synthetic construct
  source 1..20: mol_type = other RNA
ctccttcatctgagggcgga

SEQ ID NO: 11016 - RNA, 20 nt, synthetic construct
  source 1..20: mol_type = other RNA
ctccttcctcagctccagtt

SEQ ID NO: 11017 - RNA, 20 nt, synthetic construct
  source 1..20: mol_type = other RNA
ctccttgcccccctccccta

SEQ ID NO: 11018 - RNA, 20 nt, synthetic construct
  source 1..20: mol_type = other RNA
ctcggaaaccaccccagcag

SEQ ID NO: 11019 - RNA, 20 nt, synthetic construct
  source 1..20: mol_type = other RNA
ctcggacccaggagtccagg

SEQ ID NO: 11020 - RNA, 20 nt, synthetic construct
  source 1..20: mol_type = other RNA
ctcggctcgtttatttccac

SEQ ID NO: 11021 - RNA, 20 nt, synthetic construct
  source 1..20: mol_type = other RNA
ctcgggctgtgaaggggccg

SEQ ID NO: 11022 - RNA, 20 nt, synthetic construct
  source 1..20: mol_type = other RNA
ctcgtagctccctcccgcct

SEQ ID NO: 11023 - RNA, 20 nt, synthetic construct
  source 1..20: mol_type = other RNA
ctcgtccaccatctcatgcc

SEQ ID NO: 11024 - RNA, 20 nt, synthetic construct
  source 1..20: mol_type = other RNA
ctcgtcctgcatccttctcc

SEQ ID NO: 11025 - RNA, 20 nt, synthetic construct
  source 1..20: mol_type = other RNA
ctcgtggggtccaggccaag

SEQ ID NO: 11026 - RNA, 20 nt, synthetic construct
  source 1..20: mol_type = other RNA
ctcgtgggtctgagggagga

SEQ ID NO: 11027 - RNA, 20 nt, synthetic construct
  source 1..20: mol_type = other RNA
ctcgtttatttccacccagt

SEQ ID NO: 11028 - RNA, 20 nt, synthetic construct
  source 1..20: mol_type = other RNA
ctctactccctttctctttc

SEQ ID NO: 11029 - RNA, 20 nt, synthetic construct
  source 1..20: mol_type = other RNA
ctctagcccccaacccccta

SEQ ID NO: 11030 - RNA, 20 nt, synthetic construct
  source 1..20: mol_type = other RNA
ctctcaaacccaggagccca

SEQ ID NO: 11031 - RNA, 20 nt, synthetic construct
  source 1..20: mol_type = other RNA
ctctccaaagctgcccatct

SEQ ID NO: 11032 - RNA, 20 nt, synthetic construct
  source 1..20: mol_type = other RNA
ctctcccagaacctgagctg

SEQ ID NO: 11033 - RNA, 20 nt, synthetic construct
  source 1..20: mol_type = other RNA
ctctccccattcagacccag

SEQ ID NO: 11034 - RNA, 20 nt, synthetic construct
  source 1..20: mol_type = other RNA
ctctcctgccccttccctac

SEQ ID NO: 11035 - RNA, 20 nt, synthetic construct
  source 1..20: mol_type = other RNA
ctctcctgggcttgccaagg

SEQ ID NO: 11036 - RNA, 20 nt, synthetic construct
  source 1..20: mol_type = other RNA
ctctccttgcccccctcccc

SEQ ID NO: 11037 - RNA, 20 nt, synthetic construct
  source 1..20: mol_type = other RNA
ctctcgtggggtccaggcca

SEQ ID NO: 11038 - RNA, 20 nt, synthetic construct
  source 1..20: mol_type = other RNA
ctctctcaaacccaggagcc

SEQ ID NO: 11039 - RNA, 20 nt, synthetic construct
  source 1..20: mol_type = other RNA
ctctctgaaccccagcccac

SEQ ID NO: 11040 - RNA, 20 nt, synthetic construct
  source 1..20: mol_type = other RNA
ctctgaaccccagcccaccc

SEQ ID NO: 11041 - RNA, 20 nt, synthetic construct
  source 1..20: mol_type = other RNA
ctctgaaggaggaggggctg

SEQ ID NO: 11042 - RNA, 20 nt, synthetic construct
  source 1..20: mol_type = other RNA
ctctgacgcggccgtctggt

SEQ ID NO: 11043 - RNA, 20 nt, synthetic construct
  source 1..20: mol_type = other RNA
ctctgcacggggccctgcag

SEQ ID NO: 11044 - RNA, 20 nt, synthetic construct
  source 1..20: mol_type = other RNA
ctctgcaggaacgaagccgt

SEQ ID NO: 11045 - RNA, 20 nt, synthetic construct
  source 1..20: mol_type = other RNA
ctctgctcttcagactgagc

SEQ ID NO: 11046 - RNA, 20 nt, synthetic construct
  source 1..20: mol_type = other RNA
ctctggagtcccgacttgct

SEQ ID NO: 11047 - RNA, 20 nt, synthetic construct
  source 1..20: mol_type = other RNA
ctctggagtccctggtgccc

SEQ ID NO: 11048 - RNA, 20 nt, synthetic construct
  source 1..20: mol_type = other RNA
ctctggccactggctgttta

SEQ ID NO: 11049 - RNA, 20 nt, synthetic construct
  source 1..20: mol_type = other RNA
ctctgggagtcccgcccagg

SEQ ID NO: 11050 - RNA, 20 nt, synthetic construct
  source 1..20: mol_type = other RNA
ctctgggcggaggaatatgt

SEQ ID NO: 11051 - RNA, 20 nt, synthetic construct
  source 1..20: mol_type = other RNA
ctctgggcttctgggtttga

SEQ ID NO: 11052 - RNA, 20 nt, synthetic construct
  source 1..20: mol_type = other RNA
ctctgggggatgcaggggaa

SEQ ID NO: 11053 - RNA, 20 nt, synthetic construct
  source 1..20: mol_type = other RNA
ctctgggtgactcttgattc

SEQ ID NO: 11054 - RNA, 20 nt, synthetic construct
  source 1..20: mol_type = other RNA
ctctgttcagccctaagaat

SEQ ID NO: 11055 - RNA, 20 nt, synthetic construct
  source 1..20: mol_type = other RNA
ctcttcacctttctagtccc

SEQ ID NO: 11056 - RNA, 20 nt, synthetic construct
  source 1..20: mol_type = other RNA
ctcttcagactgagccccgt

SEQ ID NO: 11057 - RNA, 20 nt, synthetic construct
  source 1..20: mol_type = other RNA
ctcttccctagtctgagcac

SEQ ID NO: 11058 - RNA, 20 nt, synthetic construct
  source 1..20: mol_type = other RNA
ctcttcggggtatcccagga

SEQ ID NO: 11059 - RNA, 20 nt, synthetic construct
  source 1..20: mol_type = other RNA
ctcttctctgttcagcccta

SEQ ID NO: 11060 - RNA, 20 nt, synthetic construct
  source 1..20: mol_type = other RNA
ctcttgattcccggccagtt

SEQ ID NO: 11061 - RNA, 20 nt, synthetic construct
  source 1..20: mol_type = other RNA
ctcttggccctcgtagctcc

SEQ ID NO: 11062 - RNA, 20 nt, synthetic construct
  source 1..20: mol_type = other RNA
ctcttgggaagtgtaaggaa

SEQ ID NO: 11063 - RNA, 20 nt, synthetic construct
  source 1..20: mol_type = other RNA
ctctttaaggaaagaaggat

SEQ ID NO: 11064 - RNA, 20 nt, synthetic construct
  source 1..20: mol_type = other RNA
ctctttctccatccttcttt

SEQ ID NO: 11065 - RNA, 20 nt, synthetic construct
  source 1..20: mol_type = other RNA
ctgaaaccctcagtcctagg

SEQ ID NO: 11066 - RNA, 20 nt, synthetic construct
  source 1..20: mol_type = other RNA
ctgaacagagaagagctggg

SEQ ID NO: 11067 - RNA, 20 nt, synthetic construct
  source 1..20: mol_type = other RNA
ctgaaccccagcccacccca

SEQ ID NO: 11068 - RNA, 20 nt, synthetic construct
  source 1..20: mol_type = other RNA
ctgaactggagctgaggaag

SEQ ID NO: 11069 - RNA, 20 nt, synthetic construct
  source 1..20: mol_type = other RNA
ctgaagagcagagccaggaa

SEQ ID NO: 11070 - RNA, 20 nt, synthetic construct
  source 1..20: mol_type = other RNA
ctgaaggaggaggggctgga

SEQ ID NO: 11071 - RNA, 20 nt, synthetic construct
  source 1..20: mol_type = other RNA
ctgaaggcctggccggcctg

SEQ ID NO: 11072 - RNA, 20 nt, synthetic construct
  source 1..20: mol_type = other RNA
ctgaatggggagaggctggg

SEQ ID NO: 11073 - RNA, 20 nt, synthetic construct
  source 1..20: mol_type = other RNA
ctgacacgggccaccgtttc

SEQ ID NO: 11074 - RNA, 20 nt, synthetic construct
  source 1..20: mol_type = other RNA
ctgaccactgggcaaccagg

SEQ ID NO: 11075 - RNA, 20 nt, synthetic construct
  source 1..20: mol_type = other RNA
ctgacccaaacccagctccc

SEQ ID NO: 11076 - RNA, 20 nt, synthetic construct
  source 1..20: mol_type = other RNA
ctgacgcacggaggaacaat

SEQ ID NO: 11077 - RNA, 20 nt, synthetic construct
  source 1..20: mol_type = other RNA
ctgacgcggccgtctggtgc

SEQ ID NO: 11078 - RNA, 20 nt, synthetic construct
  source 1..20: mol_type = other RNA
ctgagaaccgggcaggtcac

SEQ ID NO: 11079 - RNA, 20 nt, synthetic construct
  source 1..20: mol_type = other RNA
ctgagaagggaatccctcct

SEQ ID NO: 11080 - RNA, 20 nt, synthetic construct
  source 1..20: mol_type = other RNA
ctgagcactgaaggcctggc

SEQ ID NO: 11081 - RNA, 20 nt, synthetic construct
  source 1..20: mol_type = other RNA
ctgagcactggaagcgccac

SEQ ID NO: 11082 - RNA, 20 nt, synthetic construct
  source 1..20: mol_type = other RNA
ctgagccccgttcccctgca

SEQ ID NO: 11083 - RNA, 20 nt, synthetic construct
  source 1..20: mol_type = other RNA
ctgagcgcctctcctgggct

SEQ ID NO: 11084 - RNA, 20 nt, synthetic construct
  source 1..20: mol_type = other RNA
ctgagctgctctgacgcggc

SEQ ID NO: 11085 - RNA, 20 nt, synthetic construct
  source 1..20: mol_type = other RNA
ctgaggaaggagtgaagcta

SEQ ID NO: 11086 - RNA, 20 nt, synthetic construct
  source 1..20: mol_type = other RNA
ctgaggccccctctgcacgg

SEQ ID NO: 11087 - RNA, 20 nt, synthetic construct
  source 1..20: mol_type = other RNA
ctgaggcctgggcaccaggg

SEQ ID NO: 11088 - RNA, 20 nt, synthetic construct
  source 1..20: mol_type = other RNA
ctgagggcggaagggctggg

SEQ ID NO: 11089 - RNA, 20 nt, synthetic construct
  source 1..20: mol_type = other RNA
ctgagggtggagggactggg

SEQ ID NO: 11090 - RNA, 20 nt, synthetic construct
  source 1..20: mol_type = other RNA
ctgagggtttcagtgctaaa

SEQ ID NO: 11091 - RNA, 20 nt, synthetic construct
  source 1..20: mol_type = other RNA
ctgagtctgtcccagcacag

SEQ ID NO: 11092 - RNA, 20 nt, synthetic construct
  source 1..20: mol_type = other RNA
ctgagttctaactttggctc

SEQ ID NO: 11093 - RNA, 20 nt, synthetic construct
  source 1..20: mol_type = other RNA
ctgatcctggtgctgcagct

SEQ ID NO: 11094 - RNA, 20 nt, synthetic construct
  source 1..20: mol_type = other RNA
ctgattttgtttttccaaac

SEQ ID NO: 11095 - RNA, 20 nt, synthetic construct
  source 1..20: mol_type = other RNA
ctgcaaacaggaagtgaacg

SEQ ID NO: 11096 - RNA, 20 nt, synthetic construct
  source 1..20: mol_type = other RNA
ctgcacacctgtgtgcctgg

SEQ ID NO: 11097 - RNA, 20 nt, synthetic construct
  source 1..20: mol_type = other RNA
ctgcaccccaattgccttag

SEQ ID NO: 11098 - RNA, 20 nt, synthetic construct
  source 1..20: mol_type = other RNA
ctgcacggggccctgcagcc

SEQ ID NO: 11099 - RNA, 20 nt, synthetic construct
  source 1..20: mol_type = other RNA
ctgcagagtatctgctgggg

SEQ ID NO: 11100 - RNA, 20 nt, synthetic construct
  source 1..20: mol_type = other RNA
ctgcagcaccaggatcagtg

SEQ ID NO: 11101 - RNA, 20 nt, synthetic construct
  source 1..20: mol_type = other RNA
ctgcagccaggggctgacac

SEQ ID NO: 11102 - RNA, 20 nt, synthetic construct
  source 1..20: mol_type = other RNA
ctgcagcttccttacacttc

SEQ ID NO: 11103 - RNA, 20 nt, synthetic construct
  source 1..20: mol_type = other RNA
ctgcaggaacgaagccgtgg

SEQ ID NO: 11104 - RNA, 20 nt, synthetic construct
  source 1..20: mol_type = other RNA
ctgcagggccccgtgcagag

SEQ ID NO: 11105 - RNA, 20 nt, synthetic construct
  source 1..20: mol_type = other RNA
ctgcatagccctgggcccac

SEQ ID NO: 11106 - RNA, 20 nt, synthetic construct
  source 1..20: mol_type = other RNA
ctgcatcccccagaggcccc

SEQ ID NO: 11107 - RNA, 20 nt, synthetic construct
  source 1..20: mol_type = other RNA
ctgcatcccccttcccctgc

SEQ ID NO: 11108 - RNA, 20 nt, synthetic construct
  source 1..20: mol_type = other RNA
ctgcatccccgttcccctgc

SEQ ID NO: 11109 - RNA, 20 nt, synthetic construct
  source 1..20: mol_type = other RNA
ctgcatccttctccaggcag

SEQ ID NO: 11110 - RNA, 20 nt, synthetic construct
  source 1..20: mol_type = other RNA
ctgccaggacggggctggct

SEQ ID NO: 11111 - RNA, 20 nt, synthetic construct
  source 1..20: mol_type = other RNA
ctgcccagtacaggcatccc

SEQ ID NO: 11112 - RNA, 20 nt, synthetic construct
  source 1..20: mol_type = other RNA
ctgcccatctggaggaggcg

SEQ ID NO: 11113 - RNA, 20 nt, synthetic construct
  source 1..20: mol_type = other RNA
ctgcccccattcctgcaccc

SEQ ID NO: 11114 - RNA, 20 nt, synthetic construct
  source 1..20: mol_type = other RNA
ctgccccttccctacagggg

SEQ ID NO: 11115 - RNA, 20 nt, synthetic construct
  source 1..20: mol_type = other RNA
ctgcccggttctcagtggcc

SEQ ID NO: 11116 - RNA, 20 nt, synthetic construct
  source 1..20: mol_type = other RNA
ctgcctggagaaggatgcag

SEQ ID NO: 11117 - RNA, 20 nt, synthetic construct
  source 1..20: mol_type = other RNA
ctgccttaaacccagccagg

SEQ ID NO: 11118 - RNA, 20 nt, synthetic construct
  source 1..20: mol_type = other RNA
ctgccttttgggtggattct

SEQ ID NO: 11119 - RNA, 20 nt, synthetic construct
  source 1..20: mol_type = other RNA
ctgcgctaccctctcccaga

SEQ ID NO: 11120 - RNA, 20 nt, synthetic construct
  source 1..20: mol_type = other RNA
ctgctctgacgcggccgtct

SEQ ID NO: 11121 - RNA, 20 nt, synthetic construct
  source 1..20: mol_type = other RNA
ctgctctgggcggaggaata

SEQ ID NO: 11122 - RNA, 20 nt, synthetic construct
  source 1..20: mol_type = other RNA
ctgctctgggcttctgggtt

SEQ ID NO: 11123 - RNA, 20 nt, synthetic construct
  source 1..20: mol_type = other RNA
ctgctcttcagactgagccc

SEQ ID NO: 11124 - RNA, 20 nt, synthetic construct
  source 1..20: mol_type = other RNA
ctgctggggtggtttccgag

SEQ ID NO: 11125 - RNA, 20 nt, synthetic construct
  source 1..20: mol_type = other RNA
ctgctgtggctgttcccaag

SEQ ID NO: 11126 - RNA, 20 nt, synthetic construct
  source 1..20: mol_type = other RNA
ctgcttctcctcttgggaag

SEQ ID NO: 11127 - RNA, 20 nt, synthetic construct
  source 1..20: mol_type = other RNA
ctgcttcttggccacgtaac

SEQ ID NO: 11128 - RNA, 20 nt, synthetic construct
  source 1..20: mol_type = other RNA
ctgcttggcaaactcactct

SEQ ID NO: 11129 - RNA, 20 nt, synthetic construct
  source 1..20: mol_type = other RNA
ctggaacctcttccctagtc

SEQ ID NO: 11130 - RNA, 20 nt, synthetic construct
  source 1..20: mol_type = other RNA
ctggaagcgccacctgtggg

SEQ ID NO: 11131 - RNA, 20 nt, synthetic construct
  source 1..20: mol_type = other RNA
ctggaccccacgagaggcca

SEQ ID NO: 11132 - RNA, 20 nt, synthetic construct
  source 1..20: mol_type = other RNA
ctggacccctgggtctgaat

SEQ ID NO: 11133 - RNA, 20 nt, synthetic construct
  source 1..20: mol_type = other RNA
ctggactccttcatctgagg

SEQ ID NO: 11134 - RNA, 20 nt, synthetic construct
  source 1..20: mol_type = other RNA
ctggactctggagtccctgg

SEQ ID NO: 11135 - RNA, 20 nt, synthetic construct
  source 1..20: mol_type = other RNA
ctggacttcggcttttgtcc

SEQ ID NO: 11136 - RNA, 20 nt, synthetic construct
  source 1..20: mol_type = other RNA
ctggacttctgggtcttagg

SEQ ID NO: 11137 - RNA, 20 nt, synthetic construct
  source 1..20: mol_type = other RNA
ctggagaaggatgcaggacg

SEQ ID NO: 11138 - RNA, 20 nt, synthetic construct
  source 1..20: mol_type = other RNA
ctggagcattggggtgggct

SEQ ID NO: 11139 - RNA, 20 nt, synthetic construct
  source 1..20: mol_type = other RNA
ctggagccaggattcttagg

SEQ ID NO: 11140 - RNA, 20 nt, synthetic construct
  source 1..20: mol_type = other RNA
ctggagctgaggaaggagtg

SEQ ID NO: 11141 - RNA, 20 nt, synthetic construct
  source 1..20: mol_type = other RNA
ctggaggaggcgggagggag

SEQ ID NO: 11142 - RNA, 20 nt, synthetic construct
  source 1..20: mol_type = other RNA
ctggagtcccgacttgctgg

SEQ ID NO: 11143 - RNA, 20 nt, synthetic construct
  source 1..20: mol_type = other RNA
ctggagtccctggtgcccag

SEQ ID NO: 11144 - RNA, 20 nt, synthetic construct
  source 1..20: mol_type = other RNA
ctggagtgtgacagcctggg

SEQ ID NO: 11145 - RNA, 20 nt, synthetic construct
  source 1..20: mol_type = other RNA
ctggatctgttttcgtggct

SEQ ID NO: 11146 - RNA, 20 nt, synthetic construct
  source 1..20: mol_type = other RNA
ctggcagggctgtggtgagg

SEQ ID NO: 11147 - RNA, 20 nt, synthetic construct
  source 1..20: mol_type = other RNA
ctggccactggctgtttaag

SEQ ID NO: 11148 - RNA, 20 nt, synthetic construct
  source 1..20: mol_type = other RNA
ctggcccccagcccctcctg

SEQ ID NO: 11149 - RNA, 20 nt, synthetic construct
  source 1..20: mol_type = other RNA
ctggccggcctgaccactgg

SEQ ID NO: 11150 - RNA, 20 nt, synthetic construct
  source 1..20: mol_type = other RNA
ctggccgggaatcaagagtc

SEQ ID NO: 11151 - RNA, 20 nt, synthetic construct
  source 1..20: mol_type = other RNA
ctggcctcctgggttgaatg

SEQ ID NO: 11152 - RNA, 20 nt, synthetic construct
  source 1..20: mol_type = other RNA
ctggccttatctcacaggta

SEQ ID NO: 11153 - RNA, 20 nt, synthetic construct
  source 1..20: mol_type = other RNA
ctggctactggccttatctc

SEQ ID NO: 11154 - RNA, 20 nt, synthetic construct
  source 1..20: mol_type = other RNA
ctggctatctgcaaacagga

SEQ ID NO: 11155 - RNA, 20 nt, synthetic construct
  source 1..20: mol_type = other RNA
ctggctccagcccctcctac

SEQ ID NO: 11156 - RNA, 20 nt, synthetic construct
  source 1..20: mol_type = other RNA
ctggctctcctgccccttcc

SEQ ID NO: 11157 - RNA, 20 nt, synthetic construct
  source 1..20: mol_type = other RNA
ctggctctgaaggaggaggg

SEQ ID NO: 11158 - RNA, 20 nt, synthetic construct
  source 1..20: mol_type = other RNA
ctggctctgctcttcagact

SEQ ID NO: 11159 - RNA, 20 nt, synthetic construct
  source 1..20: mol_type = other RNA
ctggctgcagggccccgtgc

SEQ ID NO: 11160 - RNA, 20 nt, synthetic construct
  source 1..20: mol_type = other RNA
ctggctgggtttaaggcagg

SEQ ID NO: 11161 - RNA, 20 nt, synthetic construct
  source 1..20: mol_type = other RNA
ctggctgtttaagatacgcc

SEQ ID NO: 11162 - RNA, 20 nt, synthetic construct
  source 1..20: mol_type = other RNA
ctgggaacgggatgaactcg

SEQ ID NO: 11163 - RNA, 20 nt, synthetic construct
  source 1..20: mol_type = other RNA
ctgggacagactcaggggcc

SEQ ID NO: 11164 - RNA, 20 nt, synthetic construct
  source 1..20: mol_type = other RNA
ctgggacatattcctccgcc

SEQ ID NO: 11165 - RNA, 20 nt, synthetic construct
  source 1..20: mol_type = other RNA
ctgggagagggtagcgcagg

SEQ ID NO: 11166 - RNA, 20 nt, synthetic construct
  source 1..20: mol_type = other RNA
ctgggagtcccgcccaggcc

SEQ ID NO: 11167 - RNA, 20 nt, synthetic construct
  source 1..20: mol_type = other RNA
ctgggataccccgaagagtg

SEQ ID NO: 11168 - RNA, 20 nt, synthetic construct
  source 1..20: mol_type = other RNA
ctgggcaaacagcataagct

SEQ ID NO: 11169 - RNA, 20 nt, synthetic construct
  source 1..20: mol_type = other RNA
ctgggcaaccaggcgtatct

SEQ ID NO: 11170 - RNA, 20 nt, synthetic construct
  source 1..20: mol_type = other RNA
ctgggcaccagggactccag

SEQ ID NO: 11171 - RNA, 20 nt, synthetic construct
  source 1..20: mol_type = other RNA
ctgggcaggtccttgaaagg

SEQ ID NO: 11172 - RNA, 20 nt, synthetic construct
  source 1..20: mol_type = other RNA
ctgggcccacggcttcgttc

SEQ ID NO: 11173 - RNA, 20 nt, synthetic construct
  source 1..20: mol_type = other RNA
ctgggccccaggctgtcaca

SEQ ID NO: 11174 - RNA, 20 nt, synthetic construct
  source 1..20: mol_type = other RNA
ctgggcctggacccctgggt

SEQ ID NO: 11175 - RNA, 20 nt, synthetic construct
  source 1..20: mol_type = other RNA
ctgggcggaggaatatgtcc

SEQ ID NO: 11176 - RNA, 20 nt, synthetic construct
  source 1..20: mol_type = other RNA
ctgggcgggactcccagagg

SEQ ID NO: 11177 - RNA, 20 nt, synthetic construct
  source 1..20: mol_type = other RNA
ctgggctcctgggtttgaga

SEQ ID NO: 11178 - RNA, 20 nt, synthetic construct
  source 1..20: mol_type = other RNA
ctgggcttctgggtttgagt

SEQ ID NO: 11179 - RNA, 20 nt, synthetic construct
  source 1..20: mol_type = other RNA
ctgggcttgccaaggactca

SEQ ID NO: 11180 - RNA, 20 nt, synthetic construct
  source 1..20: mol_type = other RNA
ctggggactctttaaggaaa

SEQ ID NO: 11181 - RNA, 20 nt, synthetic construct
  source 1..20: mol_type = other RNA
ctggggcaagtccctcctcc

SEQ ID NO: 11182 - RNA, 20 nt, synthetic construct
  source 1..20: mol_type = other RNA
ctggggcccaggcacacagg

SEQ ID NO: 11183 - RNA, 20 nt, synthetic construct
  source 1..20: mol_type = other RNA
ctggggcctctgggggatgc

SEQ ID NO: 11184 - RNA, 20 nt, synthetic construct
  source 1..20: mol_type = other RNA
ctggggcctggactcctggg

SEQ ID NO: 11185 - RNA, 20 nt, synthetic construct
  source 1..20: mol_type = other RNA
ctggggcctggcctcctggg

SEQ ID NO: 11186 - RNA, 20 nt, synthetic construct
  source 1..20: mol_type = other RNA
ctggggctgtgtttctcgtc

SEQ ID NO: 11187 - RNA, 20 nt, synthetic construct
  source 1..20: mol_type = other RNA
ctgggggatgcaggggaagg

SEQ ID NO: 11188 - RNA, 20 nt, synthetic construct
  source 1..20: mol_type = other RNA
ctgggggccaggactcctgg

SEQ ID NO: 11189 - RNA, 20 nt, synthetic construct
  source 1..20: mol_type = other RNA
ctgggggcctggactccttc

SEQ ID NO: 11190 - RNA, 20 nt, synthetic construct
  source 1..20: mol_type = other RNA
ctgggggcctggacttctgg

SEQ ID NO: 11191 - RNA, 20 nt, synthetic construct
  source 1..20: mol_type = other RNA
ctgggggcctgggctcctgg

SEQ ID NO: 11192 - RNA, 20 nt, synthetic construct
  source 1..20: mol_type = other RNA
ctggggtggcctctcgtggg

SEQ ID NO: 11193 - RNA, 20 nt, synthetic construct
  source 1..20: mol_type = other RNA
ctggggtggtttccgagctt

SEQ ID NO: 11194 - RNA, 20 nt, synthetic construct
  source 1..20: mol_type = other RNA
ctggggttcagagaggaggg

SEQ ID NO: 11195 - RNA, 20 nt, synthetic construct
  source 1..20: mol_type = other RNA
ctgggtctgaatggggagag

SEQ ID NO: 11196 - RNA, 20 nt, synthetic construct
  source 1..20: mol_type = other RNA
ctgggtctgagggtggaggg

SEQ ID NO: 11197 - RNA, 20 nt, synthetic construct
  source 1..20: mol_type = other RNA
ctgggtcttagggaggcggg

SEQ ID NO: 11198 - RNA, 20 nt, synthetic construct
  source 1..20: mol_type = other RNA
ctgggtgactcttgattccc

SEQ ID NO: 11199 - RNA, 20 nt, synthetic construct
  source 1..20: mol_type = other RNA
ctgggtgcgggaaccccaca

SEQ ID NO: 11200 - RNA, 20 nt, synthetic construct
  source 1..20: mol_type = other RNA
ctgggtggaaataaacgagc

SEQ ID NO: 11201 - RNA, 20 nt, synthetic construct
  source 1..20: mol_type = other RNA
ctgggtgggctccgggacct

SEQ ID NO: 11202 - RNA, 20 nt, synthetic construct
  source 1..20: mol_type = other RNA
ctgggtgtggggtgaccagc

SEQ ID NO: 11203 - RNA, 20 nt, synthetic construct
  source 1..20: mol_type = other RNA
ctgggttgaatggggagggg

SEQ ID NO: 11204 - RNA, 20 nt, synthetic construct
  source 1..20: mol_type = other RNA
ctgggtttaaggcaggaggg

SEQ ID NO: 11205 - RNA, 20 nt, synthetic construct
  source 1..20: mol_type = other RNA
ctgggtttgagagaggaggg

SEQ ID NO: 11206 - RNA, 20 nt, synthetic construct
  source 1..20: mol_type = other RNA
ctgggtttgagtccttggca

SEQ ID NO: 11207 - RNA, 20 nt, synthetic construct
  source 1..20: mol_type = other RNA
ctgggtttgggtcaggtctg

SEQ ID NO: 11208 - RNA, 20 nt, synthetic construct
  source 1..20: mol_type = other RNA
ctggtaccctgcccccattc

SEQ ID NO: 11209 - RNA, 20 nt, synthetic construct
  source 1..20: mol_type = other RNA
ctggtagacagggctggggt

SEQ ID NO: 11210 - RNA, 20 nt, synthetic construct
  source 1..20: mol_type = other RNA
ctggtcaccccacacccaga

SEQ ID NO: 11211 - RNA, 20 nt, synthetic construct
  source 1..20: mol_type = other RNA
ctggtgaacacctaggacgc

SEQ ID NO: 11212 - RNA, 20 nt, synthetic construct
  source 1..20: mol_type = other RNA
ctggtgcccaggcctcaggc

SEQ ID NO: 11213 - RNA, 20 nt, synthetic construct
  source 1..20: mol_type = other RNA
ctggtgcgtttcactgatcc

SEQ ID NO: 11214 - RNA, 20 nt, synthetic construct
  source 1..20: mol_type = other RNA
ctggtgctgcagcttcctta

SEQ ID NO: 11215 - RNA, 20 nt, synthetic construct
  source 1..20: mol_type = other RNA
ctggttgcccagtggtcagg

SEQ ID NO: 11216 - RNA, 20 nt, synthetic construct
  source 1..20: mol_type = other RNA
ctgtactgggcaggtccttg

SEQ ID NO: 11217 - RNA, 20 nt, synthetic construct
  source 1..20: mol_type = other RNA
ctgtagggaaggggcaggag

SEQ ID NO: 11218 - RNA, 20 nt, synthetic construct
  source 1..20: mol_type = other RNA
ctgtcacactccagttcact

SEQ ID NO: 11219 - RNA, 20 nt, synthetic construct
  source 1..20: mol_type = other RNA
ctgtcccagcacagggtggc

SEQ ID NO: 11220 - RNA, 20 nt, synthetic construct
  source 1..20: mol_type = other RNA
ctgtcccccttcctcgtcca

SEQ ID NO: 11221 - RNA, 20 nt, synthetic construct
  source 1..20: mol_type = other RNA
ctgtcctagcaccgtgtccc

SEQ ID NO: 11222 - RNA, 20 nt, synthetic construct
  source 1..20: mol_type = other RNA
ctgtcctgggcaaacagcat

SEQ ID NO: 11223 - RNA, 20 nt, synthetic construct
  source 1..20: mol_type = other RNA
ctgtctaccaggctgccttt

SEQ ID NO: 11224 - RNA, 20 nt, synthetic construct
  source 1..20: mol_type = other RNA
ctgtctcacccctctgggag

SEQ ID NO: 11225 - RNA, 20 nt, synthetic construct
  source 1..20: mol_type = other RNA
ctgtctctgggtgactcttg

SEQ ID NO: 11226 - RNA, 20 nt, synthetic construct
  source 1..20: mol_type = other RNA
ctgtgaaagatgcctgaggc

SEQ ID NO: 11227 - RNA, 20 nt, synthetic construct
  source 1..20: mol_type = other RNA
ctgtgaaggggccgcacgtg

SEQ ID NO: 11228 - RNA, 20 nt, synthetic construct
  source 1..20: mol_type = other RNA
ctgtgagataaggccagtag

SEQ ID NO: 11229 - RNA, 20 nt, synthetic construct
  source 1..20: mol_type = other RNA
ctgtgctgggacagactcag

SEQ ID NO: 11230 - RNA, 20 nt, synthetic construct
  source 1..20: mol_type = other RNA
ctgtggctgttcccaagttc

SEQ ID NO: 11231 - RNA, 20 nt, synthetic construct
  source 1..20: mol_type = other RNA
ctgtggggtgactgcttggc

SEQ ID NO: 11232 - RNA, 20 nt, synthetic construct
  source 1..20: mol_type = other RNA
ctgtgggtggtgacgggggt

SEQ ID NO: 11233 - RNA, 20 nt, synthetic construct
  source 1..20: mol_type = other RNA
ctgtggtgaggaggggggtg

SEQ ID NO: 11234 - RNA, 20 nt, synthetic construct
  source 1..20: mol_type = other RNA
ctgtgtgcctgggccccagg

SEQ ID NO: 11235 - RNA, 20 nt, synthetic construct
  source 1..20: mol_type = other RNA
ctgtgtttctcgtcctgcat

SEQ ID NO: 11236 - RNA, 20 nt, synthetic construct
  source 1..20: mol_type = other RNA
ctgttagacacggcaaaacc

SEQ ID NO: 11237 - RNA, 20 nt, synthetic construct
  source 1..20: mol_type = other RNA
ctgttcagccctaagaatcc

SEQ ID NO: 11238 - RNA, 20 nt, synthetic construct
  source 1..20: mol_type = other RNA
ctgttcccaagttcttaggg

SEQ ID NO: 11239 - RNA, 20 nt, synthetic construct
  source 1..20: mol_type = other RNA
ctgttgggtcattttcccca

SEQ ID NO: 11240 - RNA, 20 nt, synthetic construct
  source 1..20: mol_type = other RNA
ctgtttaagatacgcctggt

SEQ ID NO: 11241 - RNA, 20 nt, synthetic construct
  source 1..20: mol_type = other RNA
ctgtttgcagatagccagga

SEQ ID NO: 11242 - RNA, 20 nt, synthetic construct
  source 1..20: mol_type = other RNA
ctgtttgcccaggacagcct

SEQ ID NO: 11243 - RNA, 20 nt, synthetic construct
  source 1..20: mol_type = other RNA
ctgttttcctaggactgagg

SEQ ID NO: 11244 - RNA, 20 nt, synthetic construct
  source 1..20: mol_type = other RNA
ctgttttcgtggctccctct

SEQ ID NO: 11245 - RNA, 20 nt, synthetic construct
  source 1..20: mol_type = other RNA
cttaaacagccagtggccag

SEQ ID NO: 11246 - RNA, 20 nt, synthetic construct
  source 1..20: mol_type = other RNA
cttaaacccagccaggtcct

SEQ ID NO: 11247 - RNA, 20 nt, synthetic construct
  source 1..20: mol_type = other RNA
cttaaagagtccccagtgct

SEQ ID NO: 11248 - RNA, 20 nt, synthetic construct
  source 1..20: mol_type = other RNA
cttacacttcccaagaggag

SEQ ID NO: 11249 - RNA, 20 nt, synthetic construct
  source 1..20: mol_type = other RNA
cttagggaagcgggaccctg

SEQ ID NO: 11250 - RNA, 20 nt, synthetic construct
  source 1..20: mol_type = other RNA
cttagggaggcggggctggg

SEQ ID NO: 11251 - RNA, 20 nt, synthetic construct
  source 1..20: mol_type = other RNA
cttagggctgaacagagaag

SEQ ID NO: 11252 - RNA, 20 nt, synthetic construct
  source 1..20: mol_type = other RNA
cttaggggtccaaaacttgg

SEQ ID NO: 11253 - RNA, 20 nt, synthetic construct
  source 1..20: mol_type = other RNA
cttagggtaccccacgtggg

SEQ ID NO: 11254 - RNA, 20 nt, synthetic construct
  source 1..20: mol_type = other RNA
cttagtggctagggggttgg

SEQ ID NO: 11255 - RNA, 20 nt, synthetic construct
  source 1..20: mol_type = other RNA
cttatctcacaggtaaaact

SEQ ID NO: 11256 - RNA, 20 nt, synthetic construct
  source 1..20: mol_type = other RNA
cttatgctgtttgcccagga

SEQ ID NO: 11257 - RNA, 20 nt, synthetic construct
  source 1..20: mol_type = other RNA
cttattctgattttgttttt

SEQ ID NO: 11258 - RNA, 20 nt, synthetic construct
  source 1..20: mol_type = other RNA
cttcacagcccgagtttcca

SEQ ID NO: 11259 - RNA, 20 nt, synthetic construct
  source 1..20: mol_type = other RNA
cttcacctttctagtcccca

SEQ ID NO: 11260 - RNA, 20 nt, synthetic construct
  source 1..20: mol_type = other RNA
cttcactccttcctcagctc

SEQ ID NO: 11261 - RNA, 20 nt, synthetic construct
  source 1..20: mol_type = other RNA
cttcagactgagccccgttc

SEQ ID NO: 11262 - RNA, 20 nt, synthetic construct
  source 1..20: mol_type = other RNA
cttcagagccaggagtcctg

SEQ ID NO: 11263 - RNA, 20 nt, synthetic construct
  source 1..20: mol_type = other RNA
cttcagtgctcagtggaaac

SEQ ID NO: 11264 - RNA, 20 nt, synthetic construct
  source 1..20: mol_type = other RNA
cttcatctgagggcggaagg

SEQ ID NO: 11265 - RNA, 20 nt, synthetic construct
  source 1..20: mol_type = other RNA
cttccaagggtcaagctcgg

SEQ ID NO: 11266 - RNA, 20 nt, synthetic construct
  source 1..20: mol_type = other RNA
cttccagtgctcagactagg

SEQ ID NO: 11267 - RNA, 20 nt, synthetic construct
  source 1..20: mol_type = other RNA
cttcccaagaggagaagcag

SEQ ID NO: 11268 - RNA, 20 nt, synthetic construct
  source 1..20: mol_type = other RNA
cttccccgttcacttcctgt

SEQ ID NO: 11269 - RNA, 20 nt, synthetic construct
  source 1..20: mol_type = other RNA
cttcccctgcatcccccaga

SEQ ID NO: 11270 - RNA, 20 nt, synthetic construct
  source 1..20: mol_type = other RNA
cttccctaaggccctgctct

SEQ ID NO: 11271 - RNA, 20 nt, synthetic construct
  source 1..20: mol_type = other RNA
cttccctacaggggttcctg

SEQ ID NO: 11272 - RNA, 20 nt, synthetic construct
  source 1..20: mol_type = other RNA
cttccctagtctgagcactg

SEQ ID NO: 11273 - RNA, 20 nt, synthetic construct
  source 1..20: mol_type = other RNA
cttccctgtcccccttcctc

SEQ ID NO: 11274 - RNA, 20 nt, synthetic construct
  source 1..20: mol_type = other RNA
cttcccttaggggtccaaaa

SEQ ID NO: 11275 - RNA, 20 nt, synthetic construct
  source 1..20: mol_type = other RNA
cttccgccctcagatgaagg

SEQ ID NO: 11276 - RNA, 20 nt, synthetic construct
  source 1..20: mol_type = other RNA
cttcctcagctccagttcag

SEQ ID NO: 11277 - RNA, 20 nt, synthetic construct
  source 1..20: mol_type = other RNA
cttcctccaccctgcatagc

SEQ ID NO: 11278 - RNA, 20 nt, synthetic construct
  source 1..20: mol_type = other RNA
cttcctcgtccaccatctca

SEQ ID NO: 11279 - RNA, 20 nt, synthetic construct
  source 1..20: mol_type = other RNA
cttcctgtttgcagatagcc

SEQ ID NO: 11280 - RNA, 20 nt, synthetic construct
  source 1..20: mol_type = other RNA
cttccttacacttcccaaga

SEQ ID NO: 11281 - RNA, 20 nt, synthetic construct
  source 1..20: mol_type = other RNA
cttcggcttttgtcccccca

SEQ ID NO: 11282 - RNA, 20 nt, synthetic construct
  source 1..20: mol_type = other RNA
cttcggggtatcccaggagg

SEQ ID NO: 11283 - RNA, 20 nt, synthetic construct
  source 1..20: mol_type = other RNA
cttcgttcctgcagagtatc

SEQ ID NO: 11284 - RNA, 20 nt, synthetic construct
  source 1..20: mol_type = other RNA
cttctcaggttacgtggcca

SEQ ID NO: 11285 - RNA, 20 nt, synthetic construct
  source 1..20: mol_type = other RNA
cttctcatctgggtgcggga

SEQ ID NO: 11286 - RNA, 20 nt, synthetic construct
  source 1..20: mol_type = other RNA
cttctccaggcaggtcccca

SEQ ID NO: 11287 - RNA, 20 nt, synthetic construct
  source 1..20: mol_type = other RNA
cttctcctcttgggaagtgt

SEQ ID NO: 11288 - RNA, 20 nt, synthetic construct
  source 1..20: mol_type = other RNA
cttctctgttcagccctaag

SEQ ID NO: 11289 - RNA, 20 nt, synthetic construct
  source 1..20: mol_type = other RNA
cttctgggtcttagggaggc

SEQ ID NO: 11290 - RNA, 20 nt, synthetic construct
  source 1..20: mol_type = other RNA
cttctgggtttgagtccttg

SEQ ID NO: 11291 - RNA, 20 nt, synthetic construct
  source 1..20: mol_type = other RNA
cttcttggccacgtaacctg

SEQ ID NO: 11292 - RNA, 20 nt, synthetic construct
  source 1..20: mol_type = other RNA
cttctttccttaaagagtcc

SEQ ID NO: 11293 - RNA, 20 nt, synthetic construct
  source 1..20: mol_type = other RNA
cttgaaagggaaaggcccat

SEQ ID NO: 11294 - RNA, 20 nt, synthetic construct
  source 1..20: mol_type = other RNA
cttgacccttggaaggacct

SEQ ID NO: 11295 - RNA, 20 nt, synthetic construct
  source 1..20: mol_type = other RNA
cttgattcccggccagtttc

SEQ ID NO: 11296 - RNA, 20 nt, synthetic construct
  source 1..20: mol_type = other RNA
cttgccaaggactcaaaccc

SEQ ID NO: 11297 - RNA, 20 nt, synthetic construct
  source 1..20: mol_type = other RNA
cttgccccaggccttgtgga

SEQ ID NO: 11298 - RNA, 20 nt, synthetic construct
  source 1..20: mol_type = other RNA
cttgcccccctcccctatcg

SEQ ID NO: 11299 - RNA, 20 nt, synthetic construct
  source 1..20: mol_type = other RNA
cttggaaggacctggctggg

SEQ ID NO: 11300 - RNA, 20 nt, synthetic construct
  source 1..20: mol_type = other RNA
cttggcaaactcactcttcg

SEQ ID NO: 11301 - RNA, 20 nt, synthetic construct
  source 1..20: mol_type = other RNA
cttggcaagcccaggagagg

SEQ ID NO: 11302 - RNA, 20 nt, synthetic construct
  source 1..20: mol_type = other RNA
cttggccacgtaacctgaga

SEQ ID NO: 11303 - RNA, 20 nt, synthetic construct
  source 1..20: mol_type = other RNA
cttggccctcgtagctccct

SEQ ID NO: 11304 - RNA, 20 nt, synthetic construct
  source 1..20: mol_type = other RNA
cttggcctggaccccacgag

SEQ ID NO: 11305 - RNA, 20 nt, synthetic construct
  source 1..20: mol_type = other RNA
cttgggaacagccacagcag

SEQ ID NO: 11306 - RNA, 20 nt, synthetic construct
  source 1..20: mol_type = other RNA
cttgggaagtgtaaggaagc

SEQ ID NO: 11307 - RNA, 20 nt, synthetic construct
  source 1..20: mol_type = other RNA
cttggggacctgcctggaga

SEQ ID NO: 11308 - RNA, 20 nt, synthetic construct
  source 1..20: mol_type = other RNA
cttggggggacaaaagccga

SEQ ID NO: 11309 - RNA, 20 nt, synthetic construct
  source 1..20: mol_type = other RNA
cttggggggtaatttatccc

SEQ ID NO: 11310 - RNA, 20 nt, synthetic construct
  source 1..20: mol_type = other RNA
cttggtgaggctggtaccct

SEQ ID NO: 11311 - RNA, 20 nt, synthetic construct
  source 1..20: mol_type = other RNA
cttgtggacactgggtgggc

SEQ ID NO: 11312 - RNA, 20 nt, synthetic construct
  source 1..20: mol_type = other RNA
ctttaaggaaagaaggatgg

SEQ ID NO: 11313 - RNA, 20 nt, synthetic construct
  source 1..20: mol_type = other RNA
ctttcaaggacctgcccagt

SEQ ID NO: 11314 - RNA, 20 nt, synthetic construct
  source 1..20: mol_type = other RNA
ctttcacagggatgcctgta

SEQ ID NO: 11315 - RNA, 20 nt, synthetic construct
  source 1..20: mol_type = other RNA
ctttccctttcaaggacctg

SEQ ID NO: 11316 - RNA, 20 nt, synthetic construct
  source 1..20: mol_type = other RNA
ctttccttaaagagtcccca

SEQ ID NO: 11317 - RNA, 20 nt, synthetic construct
  source 1..20: mol_type = other RNA
ctttcgtggtttccactgag

SEQ ID NO: 11318 - RNA, 20 nt, synthetic construct
  source 1..20: mol_type = other RNA
ctttctagtccccaatttat

SEQ ID NO: 11319 - RNA, 20 nt, synthetic construct
  source 1..20: mol_type = other RNA
ctttctccatccttctttcc

SEQ ID NO: 11320 - RNA, 20 nt, synthetic construct
  source 1..20: mol_type = other RNA
ctttctctttctccatcctt

SEQ ID NO: 11321 - RNA, 20 nt, synthetic construct
  source 1..20: mol_type = other RNA
ctttggagaggtgagggact

SEQ ID NO: 11322 - RNA, 20 nt, synthetic construct
  source 1..20: mol_type = other RNA
ctttggctcttcacctttct

SEQ ID NO: 11323 - RNA, 20 nt, synthetic construct
  source 1..20: mol_type = other RNA
ctttgtgagaatggtgcgtc

SEQ ID NO: 11324 - RNA, 20 nt, synthetic construct
  source 1..20: mol_type = other RNA
cttttgggtggattctcctc

SEQ ID NO: 11325 - RNA, 20 nt, synthetic construct
  source 1..20: mol_type = other RNA
cttttgtccccccaagtttt

SEQ ID NO: 11326 - RNA, 20 nt, synthetic construct
  source 1..20: mol_type = other RNA
gaaaaacaaaatcagaataa

SEQ ID NO: 11327 - RNA, 20 nt, synthetic construct
  source 1..20: mol_type = other RNA
gaaaacagatccagggacac

SEQ ID NO: 11328 - RNA, 20 nt, synthetic construct
  source 1..20: mol_type = other RNA
gaaaacagggatggttggtc

SEQ ID NO: 11329 - RNA, 20 nt, synthetic construct
  source 1..20: mol_type = other RNA
gaaaactccctttgtgagaa

SEQ ID NO: 11330 - RNA, 20 nt, synthetic construct
  source 1..20: mol_type = other RNA
gaaaatgacccaacagcctc

SEQ ID NO: 11331 - RNA, 20 nt, synthetic construct
  source 1..20: mol_type = other RNA
gaaacacagccccaggtgga

SEQ ID NO: 11332 - RNA, 20 nt, synthetic construct
  source 1..20: mol_type = other RNA
gaaaccaccccagcagatac

SEQ ID NO: 11333 - RNA, 20 nt, synthetic construct
  source 1..20: mol_type = other RNA
gaaaccacgaaaggactcct

SEQ ID NO: 11334 - RNA, 20 nt, synthetic construct
  source 1..20: mol_type = other RNA
gaaaccctcagtcctaggaa

SEQ ID NO: 11335 - RNA, 20 nt, synthetic construct
  source 1..20: mol_type = other RNA
gaaacgcaccagacggccgc

SEQ ID NO: 11336 - RNA, 20 nt, synthetic construct
  source 1..20: mol_type = other RNA
gaaacggtggcccgtgtcag

SEQ ID NO: 11337 - RNA, 20 nt, synthetic construct
  source 1..20: mol_type = other RNA
gaaactcgggctgtgaaggg

SEQ ID NO: 11338 - RNA, 20 nt, synthetic construct
  source 1..20: mol_type = other RNA
gaaactggccgggaatcaag

SEQ ID NO: 11339 - RNA, 20 nt, synthetic construct
  source 1..20: mol_type = other RNA
gaaagaaggatggagaaaga

SEQ ID NO: 11340 - RNA, 20 nt, synthetic construct
  source 1..20: mol_type = other RNA
gaaagagaaagggagtagag

SEQ ID NO: 11341 - RNA, 20 nt, synthetic construct
  source 1..20: mol_type = other RNA
gaaagatgcctgaggcctgg

SEQ ID NO: 11342 - RNA, 20 nt, synthetic construct
  source 1..20: mol_type = other RNA
gaaaggactcctggctatct

SEQ ID NO: 11343 - RNA, 20 nt, synthetic construct
  source 1..20: mol_type = other RNA
gaaaggcccattgctctcct

SEQ ID NO: 11344 - RNA, 20 nt, synthetic construct
  source 1..20: mol_type = other RNA
gaaagggaaaggcccattgc

SEQ ID NO: 11345 - RNA, 20 nt, synthetic construct
  source 1..20: mol_type = other RNA
gaaagggagtagaggcggcc

SEQ ID NO: 11346 - RNA, 20 nt, synthetic construct
  source 1..20: mol_type = other RNA
gaaaggtgaagagccaaagt

SEQ ID NO: 11347 - RNA, 20 nt, synthetic construct
  source 1..20: mol_type = other RNA
gaaataaacgagccgagttc

SEQ ID NO: 11348 - RNA, 20 nt, synthetic construct
  source 1..20: mol_type = other RNA
gaacaatataaattggggac

SEQ ID NO: 11349 - RNA, 20 nt, synthetic construct
  source 1..20: mol_type = other RNA
gaacacctaggacgcaccat

SEQ ID NO: 11350 - RNA, 20 nt, synthetic construct
  source 1..20: mol_type = other RNA
gaacagagaagagctggggg

SEQ ID NO: 11351 - RNA, 20 nt, synthetic construct
  source 1..20: mol_type = other RNA
gaacagccacagcagggggg

SEQ ID NO: 11352 - RNA, 20 nt, synthetic construct
  source 1..20: mol_type = other RNA
gaaccccacatggtacctgt

SEQ ID NO: 11353 - RNA, 20 nt, synthetic construct
  source 1..20: mol_type = other RNA
gaaccccagcccaccccaat

SEQ ID NO: 11354 - RNA, 20 nt, synthetic construct
  source 1..20: mol_type = other RNA
gaacccctgtagggaagggg

SEQ ID NO: 11355 - RNA, 20 nt, synthetic construct
  source 1..20: mol_type = other RNA
gaacctcttccctagtctga

SEQ ID NO: 11356 - RNA, 20 nt, synthetic construct
  source 1..20: mol_type = other RNA
gaacctgagctgctctgacg

SEQ ID NO: 11357 - RNA, 20 nt, synthetic construct
  source 1..20: mol_type = other RNA
gaacgaagccgtgggcccag

SEQ ID NO: 11358 - RNA, 20 nt, synthetic construct
  source 1..20: mol_type = other RNA
gaacgggatgaactcggctc

SEQ ID NO: 11359 - RNA, 20 nt, synthetic construct
  source 1..20: mol_type = other RNA
gaacggggaagggagggggc

SEQ ID NO: 11360 - RNA, 20 nt, synthetic construct
  source 1..20: mol_type = other RNA
gaacggggatgcaggggaac

SEQ ID NO: 11361 - RNA, 20 nt, synthetic construct
  source 1..20: mol_type = other RNA
gaacggggctcagtctgaag

SEQ ID NO: 11362 - RNA, 20 nt, synthetic construct
  source 1..20: mol_type = other RNA
gaactcaggaccaacttatt

SEQ ID NO: 11363 - RNA, 20 nt, synthetic construct
  source 1..20: mol_type = other RNA
gaactcggctcgtttatttc

SEQ ID NO: 11364 - RNA, 20 nt, synthetic construct
  source 1..20: mol_type = other RNA
gaactggagctgaggaagga

SEQ ID NO: 11365 - RNA, 20 nt, synthetic construct
  source 1..20: mol_type = other RNA
gaactggagtgtgacagcct

SEQ ID NO: 11366 - RNA, 20 nt, synthetic construct
  source 1..20: mol_type = other RNA
gaacttgggaacagccacag

SEQ ID NO: 11367 - RNA, 20 nt, synthetic construct
  source 1..20: mol_type = other RNA
gaagaatgagaaacggtggc

SEQ ID NO: 11368 - RNA, 20 nt, synthetic construct
  source 1..20: mol_type = other RNA
gaagagcagagccaggaacc

SEQ ID NO: 11369 - RNA, 20 nt, synthetic construct
  source 1..20: mol_type = other RNA
gaagagccaaagttagaact

SEQ ID NO: 11370 - RNA, 20 nt, synthetic construct
  source 1..20: mol_type = other RNA
gaagagctgggggcctgggc

SEQ ID NO: 11371 - RNA, 20 nt, synthetic construct
  source 1..20: mol_type = other RNA
gaagaggttccagcccctcc

SEQ ID NO: 11372 - RNA, 20 nt, synthetic construct
  source 1..20: mol_type = other RNA
gaagagtgagtttgccaagc

SEQ ID NO: 11373 - RNA, 20 nt, synthetic construct
  source 1..20: mol_type = other RNA
gaagcaggggagctgggttt

SEQ ID NO: 11374 - RNA, 20 nt, synthetic construct
  source 1..20: mol_type = other RNA
gaagcagtttggaaaaacaa

SEQ ID NO: 11375 - RNA, 20 nt, synthetic construct
  source 1..20: mol_type = other RNA
gaagcccagagcagggcctt

SEQ ID NO: 11376 - RNA, 20 nt, synthetic construct
  source 1..20: mol_type = other RNA
gaagccccctcccttccccg

SEQ ID NO: 11377 - RNA, 20 nt, synthetic construct
  source 1..20: mol_type = other RNA
gaagccgtgggcccagggct

SEQ ID NO: 11378 - RNA, 20 nt, synthetic construct
  source 1..20: mol_type = other RNA
gaagcctgagcgcctctcct

SEQ ID NO: 11379 - RNA, 20 nt, synthetic construct
  source 1..20: mol_type = other RNA
gaagcgccacctgtgggtgg

SEQ ID NO: 11380 - RNA, 20 nt, synthetic construct
  source 1..20: mol_type = other RNA
gaagcgggaccctgctctgg

SEQ ID NO: 11381 - RNA, 20 nt, synthetic construct
  source 1..20: mol_type = other RNA
gaagctaaactcctagatcc

SEQ ID NO: 11382 - RNA, 20 nt, synthetic construct
  source 1..20: mol_type = other RNA
gaagctgcagcaccaggatc

SEQ ID NO: 11383 - RNA, 20 nt, synthetic construct
  source 1..20: mol_type = other RNA
gaaggacctggctgggttta

SEQ ID NO: 11384 - RNA, 20 nt, synthetic construct
  source 1..20: mol_type = other RNA
gaaggaggaggggctggaac

SEQ ID NO: 11385 - RNA, 20 nt, synthetic construct
  source 1..20: mol_type = other RNA
gaaggagtccaggcccccag

SEQ ID NO: 11386 - RNA, 20 nt, synthetic construct
  source 1..20: mol_type = other RNA
gaaggagtgaagctaaactc

SEQ ID NO: 11387 - RNA, 20 nt, synthetic construct
  source 1..20: mol_type = other RNA
gaaggatgcaggacgagaaa

SEQ ID NO: 11388 - RNA, 20 nt, synthetic construct
  source 1..20: mol_type = other RNA
gaaggatggagaaagagaaa

SEQ ID NO: 11389 - RNA, 20 nt, synthetic construct
  source 1..20: mol_type = other RNA
gaaggccaccctgtgctggg

SEQ ID NO: 11390 - RNA, 20 nt, synthetic construct
  source 1..20: mol_type = other RNA
gaaggcctggccggcctgac

SEQ ID NO: 11391 - RNA, 20 nt, synthetic construct
  source 1..20: mol_type = other RNA
gaagggaatccctcctctct

SEQ ID NO: 11392 - RNA, 20 nt, synthetic construct
  source 1..20: mol_type = other RNA
gaagggagggggcttctcat

SEQ ID NO: 11393 - RNA, 20 nt, synthetic construct
  source 1..20: mol_type = other RNA
gaagggctggggcctggcct

SEQ ID NO: 11394 - RNA, 20 nt, synthetic construct
  source 1..20: mol_type = other RNA
gaaggggcaggagagccagg

SEQ ID NO: 11395 - RNA, 20 nt, synthetic construct
  source 1..20: mol_type = other RNA
gaaggggccgcacgtgccct

SEQ ID NO: 11396 - RNA, 20 nt, synthetic construct
  source 1..20: mol_type = other RNA
gaagggggacagggaagcct

SEQ ID NO: 11397 - RNA, 20 nt, synthetic construct
  source 1..20: mol_type = other RNA
gaagggggatgcaggggaac

SEQ ID NO: 11398 - RNA, 20 nt, synthetic construct
  source 1..20: mol_type = other RNA
gaagtccagggggtcggagg

SEQ ID NO: 11399 - RNA, 20 nt, synthetic construct
  source 1..20: mol_type = other RNA
gaagtgaacggggaagggag

SEQ ID NO: 11400 - RNA, 20 nt, synthetic construct
  source 1..20: mol_type = other RNA
gaagtgtaaggaagctgcag

SEQ ID NO: 11401 - RNA, 20 nt, synthetic construct
  source 1..20: mol_type = other RNA
gaataagttggtcctgagtt

SEQ ID NO: 11402 - RNA, 20 nt, synthetic construct
  source 1..20: mol_type = other RNA
gaatatgtcccagatagcac

SEQ ID NO: 11403 - RNA, 20 nt, synthetic construct
  source 1..20: mol_type = other RNA
gaatcaagagtcacccagag

SEQ ID NO: 11404 - RNA, 20 nt, synthetic construct
  source 1..20: mol_type = other RNA
gaatccacccaaaaggcagc

SEQ ID NO: 11405 - RNA, 20 nt, synthetic construct
  source 1..20: mol_type = other RNA
gaatccctcctctctgaacc

SEQ ID NO: 11406 - RNA, 20 nt, synthetic construct
  source 1..20: mol_type = other RNA
gaatcctggctccagcccct

SEQ ID NO: 11407 - RNA, 20 nt, synthetic construct
  source 1..20: mol_type = other RNA
gaatgagaaacggtggcccg

SEQ ID NO: 11408 - RNA, 20 nt, synthetic construct
  source 1..20: mol_type = other RNA
gaatggggagaggctggggg

SEQ ID NO: 11409 - RNA, 20 nt, synthetic construct
  source 1..20: mol_type = other RNA
gaatggggaggggttgggcc

SEQ ID NO: 11410 - RNA, 20 nt, synthetic construct
  source 1..20: mol_type = other RNA
gaatgggggcagggtaccag

SEQ ID NO: 11411 - RNA, 20 nt, synthetic construct
  source 1..20: mol_type = other RNA
gaatggtgcgtcctaggtgt

SEQ ID NO: 11412 - RNA, 20 nt, synthetic construct
  source 1..20: mol_type = other RNA
gacaaaagccgaagtccagg

SEQ ID NO: 11413 - RNA, 20 nt, synthetic construct
  source 1..20: mol_type = other RNA
gacaactgggtggaaataaa

SEQ ID NO: 11414 - RNA, 20 nt, synthetic construct
  source 1..20: mol_type = other RNA
gacacccccctcctcaccac

SEQ ID NO: 11415 - RNA, 20 nt, synthetic construct
  source 1..20: mol_type = other RNA
gacacggcaaaacccccgtc

SEQ ID NO: 11416 - RNA, 20 nt, synthetic construct
  source 1..20: mol_type = other RNA
gacacgggccaccgtttctc

SEQ ID NO: 11417 - RNA, 20 nt, synthetic construct
  source 1..20: mol_type = other RNA
gacacggtgctaggacagtg

SEQ ID NO: 11418 - RNA, 20 nt, synthetic construct
  source 1..20: mol_type = other RNA
gacactgggtgggctccggg

SEQ ID NO: 11419 - RNA, 20 nt, synthetic construct
  source 1..20: mol_type = other RNA
gacagactcaggggcctggg

SEQ ID NO: 11420 - RNA, 20 nt, synthetic construct
  source 1..20: mol_type = other RNA
gacagcctagttttagcact

SEQ ID NO: 11421 - RNA, 20 nt, synthetic construct
  source 1..20: mol_type = other RNA
gacagcctggggcccaggca

SEQ ID NO: 11422 - RNA, 20 nt, synthetic construct
  source 1..20: mol_type = other RNA
gacagctgcacacctgtgtg

SEQ ID NO: 11423 - RNA, 20 nt, synthetic construct
  source 1..20: mol_type = other RNA
gacagggaagcctgagcgcc

SEQ ID NO: 11424 - RNA, 20 nt, synthetic construct
  source 1..20: mol_type = other RNA
gacagggctggggtggcctc

SEQ ID NO: 11425 - RNA, 20 nt, synthetic construct
  source 1..20: mol_type = other RNA
gacagtgaccaaccatccct

SEQ ID NO: 11426 - RNA, 20 nt, synthetic construct
  source 1..20: mol_type = other RNA
gacagtggggaaaatgaccc

SEQ ID NO: 11427 - RNA, 20 nt, synthetic construct
  source 1..20: mol_type = other RNA
gacatattcctccgcccaga

SEQ ID NO: 11428 - RNA, 20 nt, synthetic construct
  source 1..20: mol_type = other RNA
gaccaaccatccctgttttc

SEQ ID NO: 11429 - RNA, 20 nt, synthetic construct
  source 1..20: mol_type = other RNA
gaccaacttattctgatttt

SEQ ID NO: 11430 - RNA, 20 nt, synthetic construct
  source 1..20: mol_type = other RNA
gaccactgggcaaccaggcg

SEQ ID NO: 11431 - RNA, 20 nt, synthetic construct
  source 1..20: mol_type = other RNA
gaccagcttatgctgtttgc

SEQ ID NO: 11432 - RNA, 20 nt, synthetic construct
  source 1..20: mol_type = other RNA
gacccaaacccagctcccct

SEQ ID NO: 11433 - RNA, 20 nt, synthetic construct
  source 1..20: mol_type = other RNA
gacccaacagcctctggcca

SEQ ID NO: 11434 - RNA, 20 nt, synthetic construct
  source 1..20: mol_type = other RNA
gacccacgagtccaggcccc

SEQ ID NO: 11435 - RNA, 20 nt, synthetic construct
  source 1..20: mol_type = other RNA
gaccccacgagaggccaccc

SEQ ID NO: 11436 - RNA, 20 nt, synthetic construct
  source 1..20: mol_type = other RNA
gaccccctggacttcggctt

SEQ ID NO: 11437 - RNA, 20 nt, synthetic construct
  source 1..20: mol_type = other RNA
gacccctaagggaagaatga

SEQ ID NO: 11438 - RNA, 20 nt, synthetic construct
  source 1..20: mol_type = other RNA
gacccctgggtctgaatggg

SEQ ID NO: 11439 - RNA, 20 nt, synthetic construct
  source 1..20: mol_type = other RNA
gaccctgctctgggcggagg

SEQ ID NO: 11440 - RNA, 20 nt, synthetic construct
  source 1..20: mol_type = other RNA
gacccttggaaggacctggc

SEQ ID NO: 11441 - RNA, 20 nt, synthetic construct
  source 1..20: mol_type = other RNA
gacctcatgctcttggccct

SEQ ID NO: 11442 - RNA, 20 nt, synthetic construct
  source 1..20: mol_type = other RNA
gacctgaactggagctgagg

SEQ ID NO: 11443 - RNA, 20 nt, synthetic construct
  source 1..20: mol_type = other RNA
gacctgacccaaacccagct

SEQ ID NO: 11444 - RNA, 20 nt, synthetic construct
  source 1..20: mol_type = other RNA
gacctgcccagtacaggcat

SEQ ID NO: 11445 - RNA, 20 nt, synthetic construct
  source 1..20: mol_type = other RNA
gacctgcccggttctcagtg

SEQ ID NO: 11446 - RNA, 20 nt, synthetic construct
  source 1..20: mol_type = other RNA
gacctgcctggagaaggatg

SEQ ID NO: 11447 - RNA, 20 nt, synthetic construct
  source 1..20: mol_type = other RNA
gacctggctgggtttaaggc

SEQ ID NO: 11448 - RNA, 20 nt, synthetic construct
  source 1..20: mol_type = other RNA
gacctggtgaacacctagga

SEQ ID NO: 11449 - RNA, 20 nt, synthetic construct
  source 1..20: mol_type = other RNA
gacgagaaacacagccccag

SEQ ID NO: 11450 - RNA, 20 nt, synthetic construct
  source 1..20: mol_type = other RNA
gacgaggaagggggacaggg

SEQ ID NO: 11451 - RNA, 20 nt, synthetic construct
  source 1..20: mol_type = other RNA
gacgcaccattctcacaaag

SEQ ID NO: 11452 - RNA, 20 nt, synthetic construct
  source 1..20: mol_type = other RNA
gacgcacggaggaacaatat

SEQ ID NO: 11453 - RNA, 20 nt, synthetic construct
  source 1..20: mol_type = other RNA
gacgcggccgtctggtgcgt

SEQ ID NO: 11454 - RNA, 20 nt, synthetic construct
  source 1..20: mol_type = other RNA
gacggccgcgtcagagcagc

SEQ ID NO: 11455 - RNA, 20 nt, synthetic construct
  source 1..20: mol_type = other RNA
gacggggctggctactggcc

SEQ ID NO: 11456 - RNA, 20 nt, synthetic construct
  source 1..20: mol_type = other RNA
gacgggggttttgccgtgtc

SEQ ID NO: 11457 - RNA, 20 nt, synthetic construct
  source 1..20: mol_type = other RNA
gactagaaaggtgaagagcc

SEQ ID NO: 11458 - RNA, 20 nt, synthetic construct
  source 1..20: mol_type = other RNA
gactagggaagaggttccag

SEQ ID NO: 11459 - RNA, 20 nt, synthetic construct
  source 1..20: mol_type = other RNA
gactcaaacccagaagccca

SEQ ID NO: 11460 - RNA, 20 nt, synthetic construct
  source 1..20: mol_type = other RNA
gactcaggggcctgggcggg

SEQ ID NO: 11461 - RNA, 20 nt, synthetic construct
  source 1..20: mol_type = other RNA
gactccagagggagccacga

SEQ ID NO: 11462 - RNA, 20 nt, synthetic construct
  source 1..20: mol_type = other RNA
gactccagagtccaggccca

SEQ ID NO: 11463 - RNA, 20 nt, synthetic construct
  source 1..20: mol_type = other RNA
gactcccagaggggtgagac

SEQ ID NO: 11464 - RNA, 20 nt, synthetic construct
  source 1..20: mol_type = other RNA
gactcctggctatctgcaaa

SEQ ID NO: 11465 - RNA, 20 nt, synthetic construct
  source 1..20: mol_type = other RNA
gactcctggctctgaaggag

SEQ ID NO: 11466 - RNA, 20 nt, synthetic construct
  source 1..20: mol_type = other RNA
gactcctgggtctgagggtg

SEQ ID NO: 11467 - RNA, 20 nt, synthetic construct
  source 1..20: mol_type = other RNA
gactccttcatctgagggcg

SEQ ID NO: 11468 - RNA, 20 nt, synthetic construct
  source 1..20: mol_type = other RNA
gactcgtgggtctgagggag

SEQ ID NO: 11469 - RNA, 20 nt, synthetic construct
  source 1..20: mol_type = other RNA
gactctggagtccctggtgc

SEQ ID NO: 11470 - RNA, 20 nt, synthetic construct
  source 1..20: mol_type = other RNA
gactcttgattcccggccag

SEQ ID NO: 11471 - RNA, 20 nt, synthetic construct
  source 1..20: mol_type = other RNA
gactctttaaggaaagaagg

SEQ ID NO: 11472 - RNA, 20 nt, synthetic construct
  source 1..20: mol_type = other RNA
gactgagccccgttcccctg

SEQ ID NO: 11473 - RNA, 20 nt, synthetic construct
  source 1..20: mol_type = other RNA
gactgagggtttcagtgcta

SEQ ID NO: 11474 - RNA, 20 nt, synthetic construct
  source 1..20: mol_type = other RNA
gactgcttggcaaactcact

SEQ ID NO: 11475 - RNA, 20 nt, synthetic construct
  source 1..20: mol_type = other RNA
gactgggggcctggactcct

SEQ ID NO: 11476 - RNA, 20 nt, synthetic construct
  source 1..20: mol_type = other RNA
gacttcggcttttgtccccc

SEQ ID NO: 11477 - RNA, 20 nt, synthetic construct
  source 1..20: mol_type = other RNA
gacttctgggtcttagggag

SEQ ID NO: 11478 - RNA, 20 nt, synthetic construct
  source 1..20: mol_type = other RNA
gacttgccccaggccttgtg

SEQ ID NO: 11479 - RNA, 20 nt, synthetic construct
  source 1..20: mol_type = other RNA
gacttggggggtaatttatc

SEQ ID NO: 11480 - RNA, 20 nt, synthetic construct
  source 1..20: mol_type = other RNA
gagaaacacagccccaggtg

SEQ ID NO: 11481 - RNA, 20 nt, synthetic construct
  source 1..20: mol_type = other RNA
gagaaacggtggcccgtgtc

SEQ ID NO: 11482 - RNA, 20 nt, synthetic construct
  source 1..20: mol_type = other RNA
gagaaactggccgggaatca

SEQ ID NO: 11483 - RNA, 20 nt, synthetic construct
  source 1..20: mol_type = other RNA
gagaaagagaaagggagtag

SEQ ID NO: 11484 - RNA, 20 nt, synthetic construct
  source 1..20: mol_type = other RNA
gagaaagggagtagaggcgg

SEQ ID NO: 11485 - RNA, 20 nt, synthetic construct
  source 1..20: mol_type = other RNA
gagaaccgggcaggtcacgc

SEQ ID NO: 11486 - RNA, 20 nt, synthetic construct
  source 1..20: mol_type = other RNA
gagaagagctgggggcctgg

SEQ ID NO: 11487 - RNA, 20 nt, synthetic construct
  source 1..20: mol_type = other RNA
gagaagcagtttggaaaaac

SEQ ID NO: 11488 - RNA, 20 nt, synthetic construct
  source 1..20: mol_type = other RNA
gagaagccccctcccttccc

SEQ ID NO: 11489 - RNA, 20 nt, synthetic construct
  source 1..20: mol_type = other RNA
gagaaggatgcaggacgaga

SEQ ID NO: 11490 - RNA, 20 nt, synthetic construct
  source 1..20: mol_type = other RNA
gagaagggaatccctcctct

SEQ ID NO: 11491 - RNA, 20 nt, synthetic construct
  source 1..20: mol_type = other RNA
gagaatccacccaaaaggca

SEQ ID NO: 11492 - RNA, 20 nt, synthetic construct
  source 1..20: mol_type = other RNA
gagaatggtgcgtcctaggt

SEQ ID NO: 11493 - RNA, 20 nt, synthetic construct
  source 1..20: mol_type = other RNA
gagacagctgcacacctgtg

SEQ ID NO: 11494 - RNA, 20 nt, synthetic construct
  source 1..20: mol_type = other RNA
gagacagtgaccaaccatcc

SEQ ID NO: 11495 - RNA, 20 nt, synthetic construct
  source 1..20: mol_type = other RNA
gagagcaatgggcctttccc

SEQ ID NO: 11496 - RNA, 20 nt, synthetic construct
  source 1..20: mol_type = other RNA
gagagccaggggcatgagat

SEQ ID NO: 11497 - RNA, 20 nt, synthetic construct
  source 1..20: mol_type = other RNA
gagaggagggattcccttct

SEQ ID NO: 11498 - RNA, 20 nt, synthetic construct
  source 1..20: mol_type = other RNA
gagaggccaccccagccctg

SEQ ID NO: 11499 - RNA, 20 nt, synthetic construct
  source 1..20: mol_type = other RNA
gagaggcgctcaggcttccc

SEQ ID NO: 11500 - RNA, 20 nt, synthetic construct
  source 1..20: mol_type = other RNA
gagaggctgggggcctggac

SEQ ID NO: 11501 - RNA, 20 nt, synthetic construct
  source 1..20: mol_type = other RNA
gagagggtagcgcagggtgg

SEQ ID NO: 11502 - RNA, 20 nt, synthetic construct
  source 1..20: mol_type = other RNA
gagaggtgagggacttgggg

SEQ ID NO: 11503 - RNA, 20 nt, synthetic construct
  source 1..20: mol_type = other RNA
gagataaggccagtagccag

SEQ ID NO: 11504 - RNA, 20 nt, synthetic construct
  source 1..20: mol_type = other RNA
gagatggtggacgaggaagg

SEQ ID NO: 11505 - RNA, 20 nt, synthetic construct
  source 1..20: mol_type = other RNA
gagcaatgggcctttccctt

SEQ ID NO: 11506 - RNA, 20 nt, synthetic construct
  source 1..20: mol_type = other RNA
gagcactgaaggcctggccg

SEQ ID NO: 11507 - RNA, 20 nt, synthetic construct
  source 1..20: mol_type = other RNA
gagcactggaagcgccacct

SEQ ID NO: 11508 - RNA, 20 nt, synthetic construct
  source 1..20: mol_type = other RNA
gagcagagccaggaacccct

SEQ ID NO: 11509 - RNA, 20 nt, synthetic construct
  source 1..20: mol_type = other RNA
gagcagctcaggttctggga

SEQ ID NO: 11510 - RNA, 20 nt, synthetic construct
  source 1..20: mol_type = other RNA
gagcagggccttagggaagc

SEQ ID NO: 11511 - RNA, 20 nt, synthetic construct
  source 1..20: mol_type = other RNA
gagcagggtcccgcttccct

SEQ ID NO: 11512 - RNA, 20 nt, synthetic construct
  source 1..20: mol_type = other RNA
gagcatgaggtcatggaaac

SEQ ID NO: 11513 - RNA, 20 nt, synthetic construct
  source 1..20: mol_type = other RNA
gagcattggggtgggctggg

SEQ ID NO: 11514 - RNA, 20 nt, synthetic construct
  source 1..20: mol_type = other RNA
gagccaaagttagaactcag

SEQ ID NO: 11515 - RNA, 20 nt, synthetic construct
  source 1..20: mol_type = other RNA
gagccacgaaaacagatcca

SEQ ID NO: 11516 - RNA, 20 nt, synthetic construct
  source 1..20: mol_type = other RNA
gagccaggaacccctgtagg

SEQ ID NO: 11517 - RNA, 20 nt, synthetic construct
  source 1..20: mol_type = other RNA
gagccaggagtcctggcccc

SEQ ID NO: 11518 - RNA, 20 nt, synthetic construct
  source 1..20: mol_type = other RNA
gagccaggattcttagggct

SEQ ID NO: 11519 - RNA, 20 nt, synthetic construct
  source 1..20: mol_type = other RNA
gagccaggggcatgagatgg

SEQ ID NO: 11520 - RNA, 20 nt, synthetic construct
  source 1..20: mol_type = other RNA
gagcccacccagtgtccaca

SEQ ID NO: 11521 - RNA, 20 nt, synthetic construct
  source 1..20: mol_type = other RNA
gagcccaggcccccagctct

SEQ ID NO: 11522 - RNA, 20 nt, synthetic construct
  source 1..20: mol_type = other RNA
gagccccgttcccctgcatc

SEQ ID NO: 11523 - RNA, 20 nt, synthetic construct
  source 1..20: mol_type = other RNA
gagccgagttcatcccgttc

SEQ ID NO: 11524 - RNA, 20 nt, synthetic construct
  source 1..20: mol_type = other RNA
gagcgcctctcctgggcttg

SEQ ID NO: 11525 - RNA, 20 nt, synthetic construct
  source 1..20: mol_type = other RNA
gagctacgagggccaagagc

SEQ ID NO: 11526 - RNA, 20 nt, synthetic construct
  source 1..20: mol_type = other RNA
gagctgaggaaggagtgaag

SEQ ID NO: 11527 - RNA, 20 nt, synthetic construct
  source 1..20: mol_type = other RNA
gagctgctctgacgcggccg

SEQ ID NO: 11528 - RNA, 20 nt, synthetic construct
  source 1..20: mol_type = other RNA
gagctgggggcctgggctcc

SEQ ID NO: 11529 - RNA, 20 nt, synthetic construct
  source 1..20: mol_type = other RNA
gagctgggtttgggtcaggt

SEQ ID NO: 11530 - RNA, 20 nt, synthetic construct
  source 1..20: mol_type = other RNA
gagcttgacccttggaagga

SEQ ID NO: 11531 - RNA, 20 nt, synthetic construct
  source 1..20: mol_type = other RNA
gaggaacaatataaattggg

SEQ ID NO: 11532 - RNA, 20 nt, synthetic construct
  source 1..20: mol_type = other RNA
gaggaaggagtgaagctaaa

SEQ ID NO: 11533 - RNA, 20 nt, synthetic construct
  source 1..20: mol_type = other RNA
gaggaaggccaccctgtgct

SEQ ID NO: 11534 - RNA, 20 nt, synthetic construct
  source 1..20: mol_type = other RNA
gaggaagggggacagggaag

SEQ ID NO: 11535 - RNA, 20 nt, synthetic construct
  source 1..20: mol_type = other RNA
gaggaatatgtcccagatag

SEQ ID NO: 11536 - RNA, 20 nt, synthetic construct
  source 1..20: mol_type = other RNA
gaggagaagcagtttggaaa

SEQ ID NO: 11537 - RNA, 20 nt, synthetic construct
  source 1..20: mol_type = other RNA
gaggagaatccacccaaaag

SEQ ID NO: 11538 - RNA, 20 nt, synthetic construct
  source 1..20: mol_type = other RNA
gaggaggcgggagggagcta

SEQ ID NO: 11539 - RNA, 20 nt, synthetic construct
  source 1..20: mol_type = other RNA
gaggagggacttgccccagg

SEQ ID NO: 11540 - RNA, 20 nt, synthetic construct
  source 1..20: mol_type = other RNA
gaggagggattcccttctca

SEQ ID NO: 11541 - RNA, 20 nt, synthetic construct
  source 1..20: mol_type = other RNA
gaggaggggctggaacctct

SEQ ID NO: 11542 - RNA, 20 nt, synthetic construct
  source 1..20: mol_type = other RNA
gaggaggggctggggcctgg

SEQ ID NO: 11543 - RNA, 20 nt, synthetic construct
  source 1..20: mol_type = other RNA
gaggaggggggtgtccgtgt

SEQ ID NO: 11544 - RNA, 20 nt, synthetic construct
  source 1..20: mol_type = other RNA
gaggccaccccagccctgtc

SEQ ID NO: 11545 - RNA, 20 nt, synthetic construct
  source 1..20: mol_type = other RNA
gaggccaggccccagccctt

SEQ ID NO: 11546 - RNA, 20 nt, synthetic construct
  source 1..20: mol_type = other RNA
gaggccccaggccacctact

SEQ ID NO: 11547 - RNA, 20 nt, synthetic construct
  source 1..20: mol_type = other RNA
gaggccccctctgcacgggg

SEQ ID NO: 11548 - RNA, 20 nt, synthetic construct
  source 1..20: mol_type = other RNA
gaggcctggagcattggggt

SEQ ID NO: 11549 - RNA, 20 nt, synthetic construct
  source 1..20: mol_type = other RNA
gaggcctgggcaccagggac

SEQ ID NO: 11550 - RNA, 20 nt, synthetic construct
  source 1..20: mol_type = other RNA
gaggcgctcaggcttccctg

SEQ ID NO: 11551 - RNA, 20 nt, synthetic construct
  source 1..20: mol_type = other RNA
gaggcggccacgacctggtg

SEQ ID NO: 11552 - RNA, 20 nt, synthetic construct
  source 1..20: mol_type = other RNA
gaggcgggagggagctacga

SEQ ID NO: 11553 - RNA, 20 nt, synthetic construct
  source 1..20: mol_type = other RNA
gaggctgggggcctggactc

SEQ ID NO: 11554 - RNA, 20 nt, synthetic construct
  source 1..20: mol_type = other RNA
gaggctggtaccctgccccc

SEQ ID NO: 11555 - RNA, 20 nt, synthetic construct
  source 1..20: mol_type = other RNA
gaggctgttgggtcattttc

SEQ ID NO: 11556 - RNA, 20 nt, synthetic construct
  source 1..20: mol_type = other RNA
gagggacttgccccaggcct

SEQ ID NO: 11557 - RNA, 20 nt, synthetic construct
  source 1..20: mol_type = other RNA
gagggacttggggggtaatt

SEQ ID NO: 11558 - RNA, 20 nt, synthetic construct
  source 1..20: mol_type = other RNA
gagggagccacgaaaacaga

SEQ ID NO: 11559 - RNA, 20 nt, synthetic construct
  source 1..20: mol_type = other RNA
gagggagctacgagggccaa

SEQ ID NO: 11560 - RNA, 20 nt, synthetic construct
  source 1..20: mol_type = other RNA
gagggattcccttctcaggt

SEQ ID NO: 11561 - RNA, 20 nt, synthetic construct
  source 1..20: mol_type = other RNA
gagggccaagagcatgaggt

SEQ ID NO: 11562 - RNA, 20 nt, synthetic construct
  source 1..20: mol_type = other RNA
gagggcggaagggctggggc

SEQ ID NO: 11563 - RNA, 20 nt, synthetic construct
  source 1..20: mol_type = other RNA
gaggggctggaacctcttcc

SEQ ID NO: 11564 - RNA, 20 nt, synthetic construct
  source 1..20: mol_type = other RNA
gaggggctggagccaggatt

SEQ ID NO: 11565 - RNA, 20 nt, synthetic construct
  source 1..20: mol_type = other RNA
gaggggctggggcctggact

SEQ ID NO: 11566 - RNA, 20 nt, synthetic construct
  source 1..20: mol_type = other RNA
gaggggctgggggccaggac

SEQ ID NO: 11567 - RNA, 20 nt, synthetic construct
  source 1..20: mol_type = other RNA
gagggggcctcagtgaactg

SEQ ID NO: 11568 - RNA, 20 nt, synthetic construct
  source 1..20: mol_type = other RNA
gagggggcttctcatctggg

SEQ ID NO: 11569 - RNA, 20 nt, synthetic construct
  source 1..20: mol_type = other RNA
gaggggggcaaggagagcaa

SEQ ID NO: 11570 - RNA, 20 nt, synthetic construct
  source 1..20: mol_type = other RNA
gaggggggtgtccgtgtgga

SEQ ID NO: 11571 - RNA, 20 nt, synthetic construct
  source 1..20: mol_type = other RNA
gaggggtgagacagctgcac

SEQ ID NO: 11572 - RNA, 20 nt, synthetic construct
  source 1..20: mol_type = other RNA
gaggggttgggcctggactc

SEQ ID NO: 11573 - RNA, 20 nt, synthetic construct
  source 1..20: mol_type = other RNA
gagggtagcgcagggtggcc

SEQ ID NO: 11574 - RNA, 20 nt, synthetic construct
  source 1..20: mol_type = other RNA
gagggtggagggactggggg

SEQ ID NO: 11575 - RNA, 20 nt, synthetic construct
  source 1..20: mol_type = other RNA
gagggtttcagtgctaaaac

SEQ ID NO: 11576 - RNA, 20 nt, synthetic construct
  source 1..20: mol_type = other RNA
gaggtcatggaaactcgggc

SEQ ID NO: 11577 - RNA, 20 nt, synthetic construct
  source 1..20: mol_type = other RNA
gaggtgagggacttgggggg

SEQ ID NO: 11578 - RNA, 20 nt, synthetic construct
  source 1..20: mol_type = other RNA
gaggttccagcccctcctcc

SEQ ID NO: 11579 - RNA, 20 nt, synthetic construct
  source 1..20: mol_type = other RNA
gagtagaggcggccacgacc

SEQ ID NO: 11580 - RNA, 20 nt, synthetic construct
  source 1..20: mol_type = other RNA
gagtaggaggggctggagcc

SEQ ID NO: 11581 - RNA, 20 nt, synthetic construct
  source 1..20: mol_type = other RNA
gagtatctgctggggtggtt

SEQ ID NO: 11582 - RNA, 20 nt, synthetic construct
  source 1..20: mol_type = other RNA
gagtcacccagagacagtga

SEQ ID NO: 11583 - RNA, 20 nt, synthetic construct
  source 1..20: mol_type = other RNA
gagtccaggcccaacccctc

SEQ ID NO: 11584 - RNA, 20 nt, synthetic construct
  source 1..20: mol_type = other RNA
gagtccaggcccccagcctc

SEQ ID NO: 11585 - RNA, 20 nt, synthetic construct
  source 1..20: mol_type = other RNA
gagtccaggcccccagtccc

SEQ ID NO: 11586 - RNA, 20 nt, synthetic construct
  source 1..20: mol_type = other RNA
gagtccccagtgctatctgg

SEQ ID NO: 11587 - RNA, 20 nt, synthetic construct
  source 1..20: mol_type = other RNA
gagtcccgacttgctgggac

SEQ ID NO: 11588 - RNA, 20 nt, synthetic construct
  source 1..20: mol_type = other RNA
gagtcccgcccaggcccctg

SEQ ID NO: 11589 - RNA, 20 nt, synthetic construct
  source 1..20: mol_type = other RNA
gagtccctggtgcccaggcc

SEQ ID NO: 11590 - RNA, 20 nt, synthetic construct
  source 1..20: mol_type = other RNA
gagtcctggcccccagcccc

SEQ ID NO: 11591 - RNA, 20 nt, synthetic construct
  source 1..20: mol_type = other RNA
gagtccttggcaagcccagg

SEQ ID NO: 11592 - RNA, 20 nt, synthetic construct
  source 1..20: mol_type = other RNA
gagtcctttcgtggtttcca

SEQ ID NO: 11593 - RNA, 20 nt, synthetic construct
  source 1..20: mol_type = other RNA
gagtctgtcccagcacaggg

SEQ ID NO: 11594 - RNA, 20 nt, synthetic construct
  source 1..20: mol_type = other RNA
gagtgaagctaaactcctag

SEQ ID NO: 11595 - RNA, 20 nt, synthetic construct
  source 1..20: mol_type = other RNA
gagtgagtttgccaagcagt

SEQ ID NO: 11596 - RNA, 20 nt, synthetic construct
  source 1..20: mol_type = other RNA
gagtgtgacagcctggggcc

SEQ ID NO: 11597 - RNA, 20 nt, synthetic construct
  source 1..20: mol_type = other RNA
gagttcatcccgttcccagg

SEQ ID NO: 11598 - RNA, 20 nt, synthetic construct
  source 1..20: mol_type = other RNA
gagttctaactttggctctt

SEQ ID NO: 11599 - RNA, 20 nt, synthetic construct
  source 1..20: mol_type = other RNA
gagtttagcttcactccttc

SEQ ID NO: 11600 - RNA, 20 nt, synthetic construct
  source 1..20: mol_type = other RNA
gagtttccatgacctcatgc

SEQ ID NO: 11601 - RNA, 20 nt, synthetic construct
  source 1..20: mol_type = other RNA
gagtttgccaagcagtcacc

SEQ ID NO: 11602 - RNA, 20 nt, synthetic construct
  source 1..20: mol_type = other RNA
gagttttccacacggacacc

SEQ ID NO: 11603 - RNA, 20 nt, synthetic construct
  source 1..20: mol_type = other RNA
gataaacccacgtggggtac

SEQ ID NO: 11604 - RNA, 20 nt, synthetic construct
  source 1..20: mol_type = other RNA
gataaattaccccccaagtc

SEQ ID NO: 11605 - RNA, 20 nt, synthetic construct
  source 1..20: mol_type = other RNA
gataaggccagtagccagcc

SEQ ID NO: 11606 - RNA, 20 nt, synthetic construct
  source 1..20: mol_type = other RNA
gataccccgaagagtgagtt

SEQ ID NO: 11607 - RNA, 20 nt, synthetic construct
  source 1..20: mol_type = other RNA
gatacgcctggttgcccagt

SEQ ID NO: 11608 - RNA, 20 nt, synthetic construct
  source 1..20: mol_type = other RNA
gatactctgcaggaacgaag

SEQ ID NO: 11609 - RNA, 20 nt, synthetic construct
  source 1..20: mol_type = other RNA
gatagcactggggactcttt

SEQ ID NO: 11610 - RNA, 20 nt, synthetic construct
  source 1..20: mol_type = other RNA
gatagccaggagtcctttcg

SEQ ID NO: 11611 - RNA, 20 nt, synthetic construct
  source 1..20: mol_type = other RNA
gataggggaggggggcaagg

SEQ ID NO: 11612 - RNA, 20 nt, synthetic construct
  source 1..20: mol_type = other RNA
gatcagtgaaacgcaccaga

SEQ ID NO: 11613 - RNA, 20 nt, synthetic construct
  source 1..20: mol_type = other RNA
gatccacgggataaattacc

SEQ ID NO: 11614 - RNA, 20 nt, synthetic construct
  source 1..20: mol_type = other RNA
gatccagggacacggtgcta

SEQ ID NO: 11615 - RNA, 20 nt, synthetic construct
  source 1..20: mol_type = other RNA
gatcctggtgctgcagcttc

SEQ ID NO: 11616 - RNA, 20 nt, synthetic construct
  source 1..20: mol_type = other RNA
gatctaggagtttagcttca

SEQ ID NO: 11617 - RNA, 20 nt, synthetic construct
  source 1..20: mol_type = other RNA
gatctgttttcgtggctccc

SEQ ID NO: 11618 - RNA, 20 nt, synthetic construct
  source 1..20: mol_type = other RNA
gatgaactcggctcgtttat

SEQ ID NO: 11619 - RNA, 20 nt, synthetic construct
  source 1..20: mol_type = other RNA
gatgaaggagtccaggcccc

SEQ ID NO: 11620 - RNA, 20 nt, synthetic construct
  source 1..20: mol_type = other RNA
gatgagaagccccctccctt

SEQ ID NO: 11621 - RNA, 20 nt, synthetic construct
  source 1..20: mol_type = other RNA
gatgcaggacgagaaacaca

SEQ ID NO: 11622 - RNA, 20 nt, synthetic construct
  source 1..20: mol_type = other RNA
gatgcaggggaacggggatg

SEQ ID NO: 11623 - RNA, 20 nt, synthetic construct
  source 1..20: mol_type = other RNA
gatgcaggggaacggggctc

SEQ ID NO: 11624 - RNA, 20 nt, synthetic construct
  source 1..20: mol_type = other RNA
gatgcaggggaagggggatg

SEQ ID NO: 11625 - RNA, 20 nt, synthetic construct
  source 1..20: mol_type = other RNA
gatgcctgaggcctgggcac

SEQ ID NO: 11626 - RNA, 20 nt, synthetic construct
  source 1..20: mol_type = other RNA
gatgcctgtactgggcaggt

SEQ ID NO: 11627 - RNA, 20 nt, synthetic construct
  source 1..20: mol_type = other RNA
gatgcgtgacctgcccggtt

SEQ ID NO: 11628 - RNA, 20 nt, synthetic construct
  source 1..20: mol_type = other RNA
gatgcttggggacctgcctg

SEQ ID NO: 11629 - RNA, 20 nt, synthetic construct
  source 1..20: mol_type = other RNA
gatggagaaagagaaaggga

SEQ ID NO: 11630 - RNA, 20 nt, synthetic construct
  source 1..20: mol_type = other RNA
gatgggcagctttggagagg

SEQ ID NO: 11631 - RNA, 20 nt, synthetic construct
  source 1..20: mol_type = other RNA
gatggtggacgaggaagggg

SEQ ID NO: 11632 - RNA, 20 nt, synthetic construct
  source 1..20: mol_type = other RNA
gatggttggtcactgtctct

SEQ ID NO: 11633 - RNA, 20 nt, synthetic construct
  source 1..20: mol_type = other RNA
gattcccggccagtttctcc

SEQ ID NO: 11634 - RNA, 20 nt, synthetic construct
  source 1..20: mol_type = other RNA
gattcccttctcaggttacg

SEQ ID NO: 11635 - RNA, 20 nt, synthetic construct
  source 1..20: mol_type = other RNA
gattctcctccaactgtggg

SEQ ID NO: 11636 - RNA, 20 nt, synthetic construct
  source 1..20: mol_type = other RNA
gattcttagggctgaacaga

SEQ ID NO: 11637 - RNA, 20 nt, synthetic construct
  source 1..20: mol_type = other RNA
gattttgtttttccaaactg

SEQ ID NO: 11638 - RNA, 20 nt, synthetic construct
  source 1..20: mol_type = other RNA
gcaaaacccccgtcaccacc

SEQ ID NO: 11639 - RNA, 20 nt, synthetic construct
  source 1..20: mol_type = other RNA
gcaaacagcataagctggtc

SEQ ID NO: 11640 - RNA, 20 nt, synthetic construct
  source 1..20: mol_type = other RNA
gcaaacaggaagtgaacggg

SEQ ID NO: 11641 - RNA, 20 nt, synthetic construct
  source 1..20: mol_type = other RNA
gcaaactcactcttcggggt

SEQ ID NO: 11642 - RNA, 20 nt, synthetic construct
  source 1..20: mol_type = other RNA
gcaaccaggcgtatcttaaa

SEQ ID NO: 11643 - RNA, 20 nt, synthetic construct
  source 1..20: mol_type = other RNA
gcaagcccaggagaggcgct

SEQ ID NO: 11644 - RNA, 20 nt, synthetic construct
  source 1..20: mol_type = other RNA
gcaaggagagcaatgggcct

SEQ ID NO: 11645 - RNA, 20 nt, synthetic construct
  source 1..20: mol_type = other RNA
gcaagtccctcctccgaccc

SEQ ID NO: 11646 - RNA, 20 nt, synthetic construct
  source 1..20: mol_type = other RNA
gcaagtcgggactccagagg

SEQ ID NO: 11647 - RNA, 20 nt, synthetic construct
  source 1..20: mol_type = other RNA
gcaatgggcctttccctttc

SEQ ID NO: 11648 - RNA, 20 nt, synthetic construct
  source 1..20: mol_type = other RNA
gcaattggggtgcaggaatg

SEQ ID NO: 11649 - RNA, 20 nt, synthetic construct
  source 1..20: mol_type = other RNA
gcacacaggtgtgcagctgt

SEQ ID NO: 11650 - RNA, 20 nt, synthetic construct
  source 1..20: mol_type = other RNA
gcacacctgtgtgcctgggc

SEQ ID NO: 11651 - RNA, 20 nt, synthetic construct
  source 1..20: mol_type = other RNA
gcacagggtggccttcctcc

SEQ ID NO: 11652 - RNA, 20 nt, synthetic construct
  source 1..20: mol_type = other RNA
gcaccagacggccgcgtcag

SEQ ID NO: 11653 - RNA, 20 nt, synthetic construct
  source 1..20: mol_type = other RNA
gcaccaggatcagtgaaacg

SEQ ID NO: 11654 - RNA, 20 nt, synthetic construct
  source 1..20: mol_type = other RNA
gcaccagggactccagagtc

SEQ ID NO: 11655 - RNA, 20 nt, synthetic construct
  source 1..20: mol_type = other RNA
gcaccattctcacaaaggga

SEQ ID NO: 11656 - RNA, 20 nt, synthetic construct
  source 1..20: mol_type = other RNA
gcacccagatgagaagcccc

SEQ ID NO: 11657 - RNA, 20 nt, synthetic construct
  source 1..20: mol_type = other RNA
gcaccccaattgccttagtg

SEQ ID NO: 11658 - RNA, 20 nt, synthetic construct
  source 1..20: mol_type = other RNA
gcaccgtgtccctggatctg

SEQ ID NO: 11659 - RNA, 20 nt, synthetic construct
  source 1..20: mol_type = other RNA
gcacggaggaacaatataaa

SEQ ID NO: 11660 - RNA, 20 nt, synthetic construct
  source 1..20: mol_type = other RNA
gcacggggccctgcagccag

SEQ ID NO: 11661 - RNA, 20 nt, synthetic construct
  source 1..20: mol_type = other RNA
gcacgtgccctgggaacggg

SEQ ID NO: 11662 - RNA, 20 nt, synthetic construct
  source 1..20: mol_type = other RNA
gcacgtgcggccccttcaca

SEQ ID NO: 11663 - RNA, 20 nt, synthetic construct
  source 1..20: mol_type = other RNA
gcactgaaaccctcagtcct

SEQ ID NO: 11664 - RNA, 20 nt, synthetic construct
  source 1..20: mol_type = other RNA
gcactgaaggcctggccggc

SEQ ID NO: 11665 - RNA, 20 nt, synthetic construct
  source 1..20: mol_type = other RNA
gcactggaagcgccacctgt

SEQ ID NO: 11666 - RNA, 20 nt, synthetic construct
  source 1..20: mol_type = other RNA
gcactggggactctttaagg

SEQ ID NO: 11667 - RNA, 20 nt, synthetic construct
  source 1..20: mol_type = other RNA
gcagagccaggaacccctgt

SEQ ID NO: 11668 - RNA, 20 nt, synthetic construct
  source 1..20: mol_type = other RNA
gcagagggggcctcagtgaa

SEQ ID NO: 11669 - RNA, 20 nt, synthetic construct
  source 1..20: mol_type = other RNA
gcagagtatctgctggggtg

SEQ ID NO: 11670 - RNA, 20 nt, synthetic construct
  source 1..20: mol_type = other RNA
gcagatactctgcaggaacg

SEQ ID NO: 11671 - RNA, 20 nt, synthetic construct
  source 1..20: mol_type = other RNA
gcagatagccaggagtcctt

SEQ ID NO: 11672 - RNA, 20 nt, synthetic construct
  source 1..20: mol_type = other RNA
gcagcaccaggatcagtgaa

SEQ ID NO: 11673 - RNA, 20 nt, synthetic construct
  source 1..20: mol_type = other RNA
gcagccaggggctgacacgg

SEQ ID NO: 11674 - RNA, 20 nt, synthetic construct
  source 1..20: mol_type = other RNA
gcagcctggtagacagggct

SEQ ID NO: 11675 - RNA, 20 nt, synthetic construct
  source 1..20: mol_type = other RNA
gcagctcaggttctgggaga

SEQ ID NO: 11676 - RNA, 20 nt, synthetic construct
  source 1..20: mol_type = other RNA
gcagctgtctcacccctctg

SEQ ID NO: 11677 - RNA, 20 nt, synthetic construct
  source 1..20: mol_type = other RNA
gcagcttccttacacttccc

SEQ ID NO: 11678 - RNA, 20 nt, synthetic construct
  source 1..20: mol_type = other RNA
gcagctttggagaggtgagg

SEQ ID NO: 11679 - RNA, 20 nt, synthetic construct
  source 1..20: mol_type = other RNA
gcaggaacgaagccgtgggc

SEQ ID NO: 11680 - RNA, 20 nt, synthetic construct
  source 1..20: mol_type = other RNA
gcaggaatgggggcagggta

SEQ ID NO: 11681 - RNA, 20 nt, synthetic construct
  source 1..20: mol_type = other RNA
gcaggacgagaaacacagcc

SEQ ID NO: 11682 - RNA, 20 nt, synthetic construct
  source 1..20: mol_type = other RNA
gcaggagagccaggggcatg

SEQ ID NO: 11683 - RNA, 20 nt, synthetic construct
  source 1..20: mol_type = other RNA
gcaggaggggctgggggcca

SEQ ID NO: 11684 - RNA, 20 nt, synthetic construct
  source 1..20: mol_type = other RNA
gcagggccccgtgcagaggg

SEQ ID NO: 11685 - RNA, 20 nt, synthetic construct
  source 1..20: mol_type = other RNA
gcagggccttagggaagcgg

SEQ ID NO: 11686 - RNA, 20 nt, synthetic construct
  source 1..20: mol_type = other RNA
gcagggctgtggtgaggagg

SEQ ID NO: 11687 - RNA, 20 nt, synthetic construct
  source 1..20: mol_type = other RNA
gcaggggaacggggatgcag

SEQ ID NO: 11688 - RNA, 20 nt, synthetic construct
  source 1..20: mol_type = other RNA
gcaggggaacggggctcagt

SEQ ID NO: 11689 - RNA, 20 nt, synthetic construct
  source 1..20: mol_type = other RNA
gcaggggaagggggatgcag

SEQ ID NO: 11690 - RNA, 20 nt, synthetic construct
  source 1..20: mol_type = other RNA
gcaggggagctgggtttggg

SEQ ID NO: 11691 - RNA, 20 nt, synthetic construct
  source 1..20: mol_type = other RNA
gcaggggggcgatgcttggg

SEQ ID NO: 11692 - RNA, 20 nt, synthetic construct
  source 1..20: mol_type = other RNA
gcagggtaccagcctcacca

SEQ ID NO: 11693 - RNA, 20 nt, synthetic construct
  source 1..20: mol_type = other RNA
gcagggtcccgcttccctaa

SEQ ID NO: 11694 - RNA, 20 nt, synthetic construct
  source 1..20: mol_type = other RNA
gcagggtggaggaaggccac

SEQ ID NO: 11695 - RNA, 20 nt, synthetic construct
  source 1..20: mol_type = other RNA
gcagggtggccactgagaac

SEQ ID NO: 11696 - RNA, 20 nt, synthetic construct
  source 1..20: mol_type = other RNA
gcaggtccccaagcatcgcc

SEQ ID NO: 11697 - RNA, 20 nt, synthetic construct
  source 1..20: mol_type = other RNA
gcaggtccttgaaagggaaa

SEQ ID NO: 11698 - RNA, 20 nt, synthetic construct
  source 1..20: mol_type = other RNA
gcagtcaccccacagttgga

SEQ ID NO: 11699 - RNA, 20 nt, synthetic construct
  source 1..20: mol_type = other RNA
gcagtttggaaaaacaaaat

SEQ ID NO: 11700 - RNA, 20 nt, synthetic construct
  source 1..20: mol_type = other RNA
gcataagctggtcaccccac

SEQ ID NO: 11701 - RNA, 20 nt, synthetic construct
  source 1..20: mol_type = other RNA
gcatagccctgggcccacgg

SEQ ID NO: 11702 - RNA, 20 nt, synthetic construct
  source 1..20: mol_type = other RNA
gcatcccccagaggccccag

SEQ ID NO: 11703 - RNA, 20 nt, synthetic construct
  source 1..20: mol_type = other RNA
gcatcccccttcccctgcat

SEQ ID NO: 11704 - RNA, 20 nt, synthetic construct
  source 1..20: mol_type = other RNA
gcatccccgttcccctgcat

SEQ ID NO: 11705 - RNA, 20 nt, synthetic construct
  source 1..20: mol_type = other RNA
gcatccctgtgaaagatgcc

SEQ ID NO: 11706 - RNA, 20 nt, synthetic construct
  source 1..20: mol_type = other RNA
gcatccttctccaggcaggt

SEQ ID NO: 11707 - RNA, 20 nt, synthetic construct
  source 1..20: mol_type = other RNA
gcatcgcccccctgctgtgg

SEQ ID NO: 11708 - RNA, 20 nt, synthetic construct
  source 1..20: mol_type = other RNA
gcatctttcacagggatgcc

SEQ ID NO: 11709 - RNA, 20 nt, synthetic construct
  source 1..20: mol_type = other RNA
gcatgagatggtggacgagg

SEQ ID NO: 11710 - RNA, 20 nt, synthetic construct
  source 1..20: mol_type = other RNA
gcatgaggtcatggaaactc

SEQ ID NO: 11711 - RNA, 20 nt, synthetic construct
  source 1..20: mol_type = other RNA
gcattggggtgggctggggt

SEQ ID NO: 11712 - RNA, 20 nt, synthetic construct
  source 1..20: mol_type = other RNA
gccaaagttagaactcagga

SEQ ID NO: 11713 - RNA, 20 nt, synthetic construct
  source 1..20: mol_type = other RNA
gccaagaagcaggggagctg

SEQ ID NO: 11714 - RNA, 20 nt, synthetic construct
  source 1..20: mol_type = other RNA
gccaagagcatgaggtcatg

SEQ ID NO: 11715 - RNA, 20 nt, synthetic construct
  source 1..20: mol_type = other RNA
gccaagcagtcaccccacag

SEQ ID NO: 11716 - RNA, 20 nt, synthetic construct
  source 1..20: mol_type = other RNA
gccaaggactcaaacccaga

SEQ ID NO: 11717 - RNA, 20 nt, synthetic construct
  source 1..20: mol_type = other RNA
gccaagtaggtggcctgggg

SEQ ID NO: 11718 - RNA, 20 nt, synthetic construct
  source 1..20: mol_type = other RNA
gccacagcaggggggcgatg

SEQ ID NO: 11719 - RNA, 20 nt, synthetic construct
  source 1..20: mol_type = other RNA
gccaccccagccctgtctac

SEQ ID NO: 11720 - RNA, 20 nt, synthetic construct
  source 1..20: mol_type = other RNA
gccaccctgcgctaccctct

SEQ ID NO: 11721 - RNA, 20 nt, synthetic construct
  source 1..20: mol_type = other RNA
gccaccctgtgctgggacag

SEQ ID NO: 11722 - RNA, 20 nt, synthetic construct
  source 1..20: mol_type = other RNA
gccaccgtttctcattcttc

SEQ ID NO: 11723 - RNA, 20 nt, synthetic construct
  source 1..20: mol_type = other RNA
gccacctacttggcctggac

SEQ ID NO: 11724 - RNA, 20 nt, synthetic construct
  source 1..20: mol_type = other RNA
gccacctgtgggtggtgacg

SEQ ID NO: 11725 - RNA, 20 nt, synthetic construct
  source 1..20: mol_type = other RNA
gccacgaaaacagatccagg

SEQ ID NO: 11726 - RNA, 20 nt, synthetic construct
  source 1..20: mol_type = other RNA
gccacgacctggtgaacacc

SEQ ID NO: 11727 - RNA, 20 nt, synthetic construct
  source 1..20: mol_type = other RNA
gccacggtgtcccagcaagt

SEQ ID NO: 11728 - RNA, 20 nt, synthetic construct
  source 1..20: mol_type = other RNA
gccacgtaacctgagaaggg

SEQ ID NO: 11729 - RNA, 20 nt, synthetic construct
  source 1..20: mol_type = other RNA
gccactaaggcaattggggt

SEQ ID NO: 11730 - RNA, 20 nt, synthetic construct
  source 1..20: mol_type = other RNA
gccactgagaaccgggcagg

SEQ ID NO: 11731 - RNA, 20 nt, synthetic construct
  source 1..20: mol_type = other RNA
gccactggctgtttaagata

SEQ ID NO: 11732 - RNA, 20 nt, synthetic construct
  source 1..20: mol_type = other RNA
gccagaggctgttgggtcat

SEQ ID NO: 11733 - RNA, 20 nt, synthetic construct
  source 1..20: mol_type = other RNA
gccagccccgtcctggcagg

SEQ ID NO: 11734 - RNA, 20 nt, synthetic construct
  source 1..20: mol_type = other RNA
gccaggaacccctgtaggga

SEQ ID NO: 11735 - RNA, 20 nt, synthetic construct
  source 1..20: mol_type = other RNA
gccaggacggggctggctac

SEQ ID NO: 11736 - RNA, 20 nt, synthetic construct
  source 1..20: mol_type = other RNA
gccaggactcctggctctga

SEQ ID NO: 11737 - RNA, 20 nt, synthetic construct
  source 1..20: mol_type = other RNA
gccaggagtcctggccccca

SEQ ID NO: 11738 - RNA, 20 nt, synthetic construct
  source 1..20: mol_type = other RNA
gccaggagtcctttcgtggt

SEQ ID NO: 11739 - RNA, 20 nt, synthetic construct
  source 1..20: mol_type = other RNA
gccaggattcttagggctga

SEQ ID NO: 11740 - RNA, 20 nt, synthetic construct
  source 1..20: mol_type = other RNA
gccaggccccagcccttccg

SEQ ID NO: 11741 - RNA, 20 nt, synthetic construct
  source 1..20: mol_type = other RNA
gccaggccttcagtgctcag

SEQ ID NO: 11742 - RNA, 20 nt, synthetic construct
  source 1..20: mol_type = other RNA
gccaggggcatgagatggtg

SEQ ID NO: 11743 - RNA, 20 nt, synthetic construct
  source 1..20: mol_type = other RNA
gccaggggctgacacgggcc

SEQ ID NO: 11744 - RNA, 20 nt, synthetic construct
  source 1..20: mol_type = other RNA
gccaggtccttccaagggtc

SEQ ID NO: 11745 - RNA, 20 nt, synthetic construct
  source 1..20: mol_type = other RNA
gccagtagccagccccgtcc

SEQ ID NO: 11746 - RNA, 20 nt, synthetic construct
  source 1..20: mol_type = other RNA
gccagtggccagaggctgtt

SEQ ID NO: 11747 - RNA, 20 nt, synthetic construct
  source 1..20: mol_type = other RNA
gccagtttctccacctgggg

SEQ ID NO: 11748 - RNA, 20 nt, synthetic construct
  source 1..20: mol_type = other RNA
gccatgacaactgggtggaa

SEQ ID NO: 11749 - RNA, 20 nt, synthetic construct
  source 1..20: mol_type = other RNA
gcccaacccctccccattca

SEQ ID NO: 11750 - RNA, 20 nt, synthetic construct
  source 1..20: mol_type = other RNA
gcccacccagtgtccacaag

SEQ ID NO: 11751 - RNA, 20 nt, synthetic construct
  source 1..20: mol_type = other RNA
gcccaccccaatgctccagg

SEQ ID NO: 11752 - RNA, 20 nt, synthetic construct
  source 1..20: mol_type = other RNA
gcccacggcttcgttcctgc

SEQ ID NO: 11753 - RNA, 20 nt, synthetic construct
  source 1..20: mol_type = other RNA
gcccagagcagggccttagg

SEQ ID NO: 11754 - RNA, 20 nt, synthetic construct
  source 1..20: mol_type = other RNA
gcccagagcagggtcccgct

SEQ ID NO: 11755 - RNA, 20 nt, synthetic construct
  source 1..20: mol_type = other RNA
gcccagccccgcctccctaa

SEQ ID NO: 11756 - RNA, 20 nt, synthetic construct
  source 1..20: mol_type = other RNA
gcccaggacagcctagtttt

SEQ ID NO: 11757 - RNA, 20 nt, synthetic construct
  source 1..20: mol_type = other RNA
gcccaggagaggcgctcagg

SEQ ID NO: 11758 - RNA, 20 nt, synthetic construct
  source 1..20: mol_type = other RNA
gcccaggcacacaggtgtgc

SEQ ID NO: 11759 - RNA, 20 nt, synthetic construct
  source 1..20: mol_type = other RNA
gcccaggcccccagctcttc

SEQ ID NO: 11760 - RNA, 20 nt, synthetic construct
  source 1..20: mol_type = other RNA
gcccaggcccctgagtctgt

SEQ ID NO: 11761 - RNA, 20 nt, synthetic construct
  source 1..20: mol_type = other RNA
gcccaggcctcaggcatctt

SEQ ID NO: 11762 - RNA, 20 nt, synthetic construct
  source 1..20: mol_type = other RNA
gcccagggctatgcagggtg

SEQ ID NO: 11763 - RNA, 20 nt, synthetic construct
  source 1..20: mol_type = other RNA
gcccagtacaggcatccctg

SEQ ID NO: 11764 - RNA, 20 nt, synthetic construct
  source 1..20: mol_type = other RNA
gcccagtggtcaggccggcc

SEQ ID NO: 11765 - RNA, 20 nt, synthetic construct
  source 1..20: mol_type = other RNA
gcccatctggaggaggcggg

SEQ ID NO: 11766 - RNA, 20 nt, synthetic construct
  source 1..20: mol_type = other RNA
gcccattgctctccttgccc

SEQ ID NO: 11767 - RNA, 20 nt, synthetic construct
  source 1..20: mol_type = other RNA
gccccagcccctcctctctc

SEQ ID NO: 11768 - RNA, 20 nt, synthetic construct
  source 1..20: mol_type = other RNA
gccccagcccttccgccctc

SEQ ID NO: 11769 - RNA, 20 nt, synthetic construct
  source 1..20: mol_type = other RNA
gccccaggccacctacttgg

SEQ ID NO: 11770 - RNA, 20 nt, synthetic construct
  source 1..20: mol_type = other RNA
gccccaggccttgtggacac

SEQ ID NO: 11771 - RNA, 20 nt, synthetic construct
  source 1..20: mol_type = other RNA
gccccaggctgtcacactcc

SEQ ID NO: 11772 - RNA, 20 nt, synthetic construct
  source 1..20: mol_type = other RNA
gccccaggtggagaaactgg

SEQ ID NO: 11773 - RNA, 20 nt, synthetic construct
  source 1..20: mol_type = other RNA
gcccccaaccccctagccac

SEQ ID NO: 11774 - RNA, 20 nt, synthetic construct
  source 1..20: mol_type = other RNA
gcccccagcccctcctgcct

SEQ ID NO: 11775 - RNA, 20 nt, synthetic construct
  source 1..20: mol_type = other RNA
gcccccagcctctccccatt

SEQ ID NO: 11776 - RNA, 20 nt, synthetic construct
  source 1..20: mol_type = other RNA
gcccccagctcttctctgtt

SEQ ID NO: 11777 - RNA, 20 nt, synthetic construct
  source 1..20: mol_type = other RNA
gcccccagtccctccaccct

SEQ ID NO: 11778 - RNA, 20 nt, synthetic construct
  source 1..20: mol_type = other RNA
gcccccattcctgcacccca

SEQ ID NO: 11779 - RNA, 20 nt, synthetic construct
  source 1..20: mol_type = other RNA
gcccccctcccctatcgcca

SEQ ID NO: 11780 - RNA, 20 nt, synthetic construct
  source 1..20: mol_type = other RNA
gcccccctgctgtggctgtt

SEQ ID NO: 11781 - RNA, 20 nt, synthetic construct
  source 1..20: mol_type = other RNA
gccccctcccttccccgttc

SEQ ID NO: 11782 - RNA, 20 nt, synthetic construct
  source 1..20: mol_type = other RNA
gccccctctgcacggggccc

SEQ ID NO: 11783 - RNA, 20 nt, synthetic construct
  source 1..20: mol_type = other RNA
gccccgcctccctaagaccc

SEQ ID NO: 11784 - RNA, 20 nt, synthetic construct
  source 1..20: mol_type = other RNA
gccccgtcctggcagggctg

SEQ ID NO: 11785 - RNA, 20 nt, synthetic construct
  source 1..20: mol_type = other RNA
gccccgtgcagagggggcct

SEQ ID NO: 11786 - RNA, 20 nt, synthetic construct
  source 1..20: mol_type = other RNA
gccccgttcccctgcatccc

SEQ ID NO: 11787 - RNA, 20 nt, synthetic construct
  source 1..20: mol_type = other RNA
gcccctcctactctagcccc

SEQ ID NO: 11788 - RNA, 20 nt, synthetic construct
  source 1..20: mol_type = other RNA
gcccctcctccttcagagcc

SEQ ID NO: 11789 - RNA, 20 nt, synthetic construct
  source 1..20: mol_type = other RNA
gcccctcctctctcaaaccc

SEQ ID NO: 11790 - RNA, 20 nt, synthetic construct
  source 1..20: mol_type = other RNA
gcccctcctgccttaaaccc

SEQ ID NO: 11791 - RNA, 20 nt, synthetic construct
  source 1..20: mol_type = other RNA
gcccctgagtctgtcccagc

SEQ ID NO: 11792 - RNA, 20 nt, synthetic construct
  source 1..20: mol_type = other RNA
gcccctggctctcctgcccc

SEQ ID NO: 11793 - RNA, 20 nt, synthetic construct
  source 1..20: mol_type = other RNA
gcccctggctgcagggcccc

SEQ ID NO: 11794 - RNA, 20 nt, synthetic construct
  source 1..20: mol_type = other RNA
gccccttcacagcccgagtt

SEQ ID NO: 11795 - RNA, 20 nt, synthetic construct
  source 1..20: mol_type = other RNA
gccccttccctacaggggtt

SEQ ID NO: 11796 - RNA, 20 nt, synthetic construct
  source 1..20: mol_type = other RNA
gcccgagtttccatgacctc

SEQ ID NO: 11797 - RNA, 20 nt, synthetic construct
  source 1..20: mol_type = other RNA
gcccggttctcagtggccac

SEQ ID NO: 11798 - RNA, 20 nt, synthetic construct
  source 1..20: mol_type = other RNA
gcccgtgtcagcccctggct

SEQ ID NO: 11799 - RNA, 20 nt, synthetic construct
  source 1..20: mol_type = other RNA
gccctaagaatcctggctcc

SEQ ID NO: 11800 - RNA, 20 nt, synthetic construct
  source 1..20: mol_type = other RNA
gccctcagatgaaggagtcc

SEQ ID NO: 11801 - RNA, 20 nt, synthetic construct
  source 1..20: mol_type = other RNA
gccctcgtagctccctcccg

SEQ ID NO: 11802 - RNA, 20 nt, synthetic construct
  source 1..20: mol_type = other RNA
gccctgcagccaggggctga

SEQ ID NO: 11803 - RNA, 20 nt, synthetic construct
  source 1..20: mol_type = other RNA
gccctgccaggacggggctg

SEQ ID NO: 11804 - RNA, 20 nt, synthetic construct
  source 1..20: mol_type = other RNA
gccctgctctgggcttctgg

SEQ ID NO: 11805 - RNA, 20 nt, synthetic construct
  source 1..20: mol_type = other RNA
gccctgggaacgggatgaac

SEQ ID NO: 11806 - RNA, 20 nt, synthetic construct
  source 1..20: mol_type = other RNA
gccctgggcccacggcttcg

SEQ ID NO: 11807 - RNA, 20 nt, synthetic construct
  source 1..20: mol_type = other RNA
gccctgtctaccaggctgcc

SEQ ID NO: 11808 - RNA, 20 nt, synthetic construct
  source 1..20: mol_type = other RNA
gcccttccgccctcagatga

SEQ ID NO: 11809 - RNA, 20 nt, synthetic construct
  source 1..20: mol_type = other RNA
gccgaagtccagggggtcgg

SEQ ID NO: 11810 - RNA, 20 nt, synthetic construct
  source 1..20: mol_type = other RNA
gccgagttcatcccgttccc

SEQ ID NO: 11811 - RNA, 20 nt, synthetic construct
  source 1..20: mol_type = other RNA
gccgcacgtgccctgggaac

SEQ ID NO: 11812 - RNA, 20 nt, synthetic construct
  source 1..20: mol_type = other RNA
gccgcctctactccctttct

SEQ ID NO: 11813 - RNA, 20 nt, synthetic construct
  source 1..20: mol_type = other RNA
gccgcgtcagagcagctcag

SEQ ID NO: 11814 - RNA, 20 nt, synthetic construct
  source 1..20: mol_type = other RNA
gccggccaggccttcagtgc

SEQ ID NO: 11815 - RNA, 20 nt, synthetic construct
  source 1..20: mol_type = other RNA
gccggcctgaccactgggca

SEQ ID NO: 11816 - RNA, 20 nt, synthetic construct
  source 1..20: mol_type = other RNA
gccgggaatcaagagtcacc

SEQ ID NO: 11817 - RNA, 20 nt, synthetic construct
  source 1..20: mol_type = other RNA
gccgtctggtgcgtttcact

SEQ ID NO: 11818 - RNA, 20 nt, synthetic construct
  source 1..20: mol_type = other RNA
gccgtgggcccagggctatg

SEQ ID NO: 11819 - RNA, 20 nt, synthetic construct
  source 1..20: mol_type = other RNA
gccgtgtctaacaggtacca

SEQ ID NO: 11820 - RNA, 20 nt, synthetic construct
  source 1..20: mol_type = other RNA
gcctagttttagcactgaaa

SEQ ID NO: 11821 - RNA, 20 nt, synthetic construct
  source 1..20: mol_type = other RNA
gcctcaccaagtggttgata

SEQ ID NO: 11822 - RNA, 20 nt, synthetic construct
  source 1..20: mol_type = other RNA
gcctcaggcatctttcacag

SEQ ID NO: 11823 - RNA, 20 nt, synthetic construct
  source 1..20: mol_type = other RNA
gcctcagtgaactggagtgt

SEQ ID NO: 11824 - RNA, 20 nt, synthetic construct
  source 1..20: mol_type = other RNA
gcctccctaagacccagaag

SEQ ID NO: 11825 - RNA, 20 nt, synthetic construct
  source 1..20: mol_type = other RNA
gcctcctccagatgggcagc

SEQ ID NO: 11826 - RNA, 20 nt, synthetic construct
  source 1..20: mol_type = other RNA
gcctcctgggataccccgaa

SEQ ID NO: 11827 - RNA, 20 nt, synthetic construct
  source 1..20: mol_type = other RNA
gcctcctgggttgaatgggg

SEQ ID NO: 11828 - RNA, 20 nt, synthetic construct
  source 1..20: mol_type = other RNA
gcctctactccctttctctt

SEQ ID NO: 11829 - RNA, 20 nt, synthetic construct
  source 1..20: mol_type = other RNA
gcctctccccattcagaccc

SEQ ID NO: 11830 - RNA, 20 nt, synthetic construct
  source 1..20: mol_type = other RNA
gcctctcctgggcttgccaa

SEQ ID NO: 11831 - RNA, 20 nt, synthetic construct
  source 1..20: mol_type = other RNA
gcctctcgtggggtccaggc

SEQ ID NO: 11832 - RNA, 20 nt, synthetic construct
  source 1..20: mol_type = other RNA
gcctctggccactggctgtt

SEQ ID NO: 11833 - RNA, 20 nt, synthetic construct
  source 1..20: mol_type = other RNA
gcctctgggggatgcagggg

SEQ ID NO: 11834 - RNA, 20 nt, synthetic construct
  source 1..20: mol_type = other RNA
gcctgaccactgggcaacca

SEQ ID NO: 11835 - RNA, 20 nt, synthetic construct
  source 1..20: mol_type = other RNA
gcctgagcgcctctcctggg

SEQ ID NO: 11836 - RNA, 20 nt, synthetic construct
  source 1..20: mol_type = other RNA
gcctgaggcctgggcaccag

SEQ ID NO: 11837 - RNA, 20 nt, synthetic construct
  source 1..20: mol_type = other RNA
gcctggaccccacgagaggc

SEQ ID NO: 11838 - RNA, 20 nt, synthetic construct
  source 1..20: mol_type = other RNA
gcctggacccctgggtctga

SEQ ID NO: 11839 - RNA, 20 nt, synthetic construct
  source 1..20: mol_type = other RNA
gcctggactccttcatctga

SEQ ID NO: 11840 - RNA, 20 nt, synthetic construct
  source 1..20: mol_type = other RNA
gcctggactctggagtccct

SEQ ID NO: 11841 - RNA, 20 nt, synthetic construct
  source 1..20: mol_type = other RNA
gcctggacttctgggtctta

SEQ ID NO: 11842 - RNA, 20 nt, synthetic construct
  source 1..20: mol_type = other RNA
gcctggagaaggatgcagga

SEQ ID NO: 11843 - RNA, 20 nt, synthetic construct
  source 1..20: mol_type = other RNA
gcctggagcattggggtggg

SEQ ID NO: 11844 - RNA, 20 nt, synthetic construct
  source 1..20: mol_type = other RNA
gcctggccggcctgaccact

SEQ ID NO: 11845 - RNA, 20 nt, synthetic construct
  source 1..20: mol_type = other RNA
gcctggcctcctgggttgaa

SEQ ID NO: 11846 - RNA, 20 nt, synthetic construct
  source 1..20: mol_type = other RNA
gcctgggcaccagggactcc

SEQ ID NO: 11847 - RNA, 20 nt, synthetic construct
  source 1..20: mol_type = other RNA
gcctgggccccaggctgtca

SEQ ID NO: 11848 - RNA, 20 nt, synthetic construct
  source 1..20: mol_type = other RNA
gcctgggcgggactcccaga

SEQ ID NO: 11849 - RNA, 20 nt, synthetic construct
  source 1..20: mol_type = other RNA
gcctgggctcctgggtttga

SEQ ID NO: 11850 - RNA, 20 nt, synthetic construct
  source 1..20: mol_type = other RNA
gcctggggcaagtccctcct

SEQ ID NO: 11851 - RNA, 20 nt, synthetic construct
  source 1..20: mol_type = other RNA
gcctggggcccaggcacaca

SEQ ID NO: 11852 - RNA, 20 nt, synthetic construct
  source 1..20: mol_type = other RNA
gcctggggcctctgggggat

SEQ ID NO: 11853 - RNA, 20 nt, synthetic construct
  source 1..20: mol_type = other RNA
gcctggtagacagggctggg

SEQ ID NO: 11854 - RNA, 20 nt, synthetic construct
  source 1..20: mol_type = other RNA
gcctggttgcccagtggtca

SEQ ID NO: 11855 - RNA, 20 nt, synthetic construct
  source 1..20: mol_type = other RNA
gcctgtactgggcaggtcct

SEQ ID NO: 11856 - RNA, 20 nt, synthetic construct
  source 1..20: mol_type = other RNA
gccttaaacccagccaggtc

SEQ ID NO: 11857 - RNA, 20 nt, synthetic construct
  source 1..20: mol_type = other RNA
gccttagggaagcgggaccc

SEQ ID NO: 11858 - RNA, 20 nt, synthetic construct
  source 1..20: mol_type = other RNA
gccttagtggctagggggtt

SEQ ID NO: 11859 - RNA, 20 nt, synthetic construct
  source 1..20: mol_type = other RNA
gccttatctcacaggtaaaa

SEQ ID NO: 11860 - RNA, 20 nt, synthetic construct
  source 1..20: mol_type = other RNA
gccttcagtgctcagtggaa

SEQ ID NO: 11861 - RNA, 20 nt, synthetic construct
  source 1..20: mol_type = other RNA
gccttcctccaccctgcata

SEQ ID NO: 11862 - RNA, 20 nt, synthetic construct
  source 1..20: mol_type = other RNA
gccttgtggacactgggtgg

SEQ ID NO: 11863 - RNA, 20 nt, synthetic construct
  source 1..20: mol_type = other RNA
gcctttccctttcaaggacc

SEQ ID NO: 11864 - RNA, 20 nt, synthetic construct
  source 1..20: mol_type = other RNA
gccttttgggtggattctcc

SEQ ID NO: 11865 - RNA, 20 nt, synthetic construct
  source 1..20: mol_type = other RNA
gcgataggggaggggggcaa

SEQ ID NO: 11866 - RNA, 20 nt, synthetic construct
  source 1..20: mol_type = other RNA
gcgatgcttggggacctgcc

SEQ ID NO: 11867 - RNA, 20 nt, synthetic construct
  source 1..20: mol_type = other RNA
gcgcagggtggccactgaga

SEQ ID NO: 11868 - RNA, 20 nt, synthetic construct
  source 1..20: mol_type = other RNA
gcgccacctgtgggtggtga

SEQ ID NO: 11869 - RNA, 20 nt, synthetic construct
  source 1..20: mol_type = other RNA
gcgcctctcctgggcttgcc

SEQ ID NO: 11870 - RNA, 20 nt, synthetic construct
  source 1..20: mol_type = other RNA
gcgctaccctctcccagaac

SEQ ID NO: 11871 - RNA, 20 nt, synthetic construct
  source 1..20: mol_type = other RNA
gcgctcaggcttccctgtcc

SEQ ID NO: 11872 - RNA, 20 nt, synthetic construct
  source 1..20: mol_type = other RNA
gcgcttccagtgctcagact

SEQ ID NO: 11873 - RNA, 20 nt, synthetic construct
  source 1..20: mol_type = other RNA
gcggaagggctggggcctgg

SEQ ID NO: 11874 - RNA, 20 nt, synthetic construct
  source 1..20: mol_type = other RNA
gcggaggaatatgtcccaga

SEQ ID NO: 11875 - RNA, 20 nt, synthetic construct
  source 1..20: mol_type = other RNA
gcggccacgacctggtgaac

SEQ ID NO: 11876 - RNA, 20 nt, synthetic construct
  source 1..20: mol_type = other RNA
gcggccccttcacagcccga

SEQ ID NO: 11877 - RNA, 20 nt, synthetic construct
  source 1..20: mol_type = other RNA
gcggccgtctggtgcgtttc

SEQ ID NO: 11878 - RNA, 20 nt, synthetic construct
  source 1..20: mol_type = other RNA
gcgggaaccccacatggtac

SEQ ID NO: 11879 - RNA, 20 nt, synthetic construct
  source 1..20: mol_type = other RNA
gcgggaccctgctctgggcg

SEQ ID NO: 11880 - RNA, 20 nt, synthetic construct
  source 1..20: mol_type = other RNA
gcgggactcccagaggggtg

SEQ ID NO: 11881 - RNA, 20 nt, synthetic construct
  source 1..20: mol_type = other RNA
gcgggagggagctacgaggg

SEQ ID NO: 11882 - RNA, 20 nt, synthetic construct
  source 1..20: mol_type = other RNA
gcggggctgggcctggaccc

SEQ ID NO: 11883 - RNA, 20 nt, synthetic construct
  source 1..20: mol_type = other RNA
gcgtatcttaaacagccagt

SEQ ID NO: 11884 - RNA, 20 nt, synthetic construct
  source 1..20: mol_type = other RNA
gcgtcagagcagctcaggtt

SEQ ID NO: 11885 - RNA, 20 nt, synthetic construct
  source 1..20: mol_type = other RNA
gcgtcagttttacctgtgag

SEQ ID NO: 11886 - RNA, 20 nt, synthetic construct
  source 1..20: mol_type = other RNA
gcgtcctaggtgttcaccag

SEQ ID NO: 11887 - RNA, 20 nt, synthetic construct
  source 1..20: mol_type = other RNA
gcgtgacctgcccggttctc

SEQ ID NO: 11888 - RNA, 20 nt, synthetic construct
  source 1..20: mol_type = other RNA
gcgtttcactgatcctggtg

SEQ ID NO: 11889 - RNA, 20 nt, synthetic construct
  source 1..20: mol_type = other RNA
gctaaaactaggctgtcctg

SEQ ID NO: 11890 - RNA, 20 nt, synthetic construct
  source 1..20: mol_type = other RNA
gctaaactcctagatccacg

SEQ ID NO: 11891 - RNA, 20 nt, synthetic construct
  source 1..20: mol_type = other RNA
gctaccctctcccagaacct

SEQ ID NO: 11892 - RNA, 20 nt, synthetic construct
  source 1..20: mol_type = other RNA
gctacgagggccaagagcat

SEQ ID NO: 11893 - RNA, 20 nt, synthetic construct
  source 1..20: mol_type = other RNA
gctactggccttatctcaca

SEQ ID NO: 11894 - RNA, 20 nt, synthetic construct
  source 1..20: mol_type = other RNA
gctagagtaggaggggctgg

SEQ ID NO: 11895 - RNA, 20 nt, synthetic construct
  source 1..20: mol_type = other RNA
gctaggacagtggggaaaat

SEQ ID NO: 11896 - RNA, 20 nt, synthetic construct
  source 1..20: mol_type = other RNA
gctagggggttgggggctag

SEQ ID NO: 11897 - RNA, 20 nt, synthetic construct
  source 1..20: mol_type = other RNA
gctatctgcaaacaggaagt

SEQ ID NO: 11898 - RNA, 20 nt, synthetic construct
  source 1..20: mol_type = other RNA
gctatctgggacatattcct

SEQ ID NO: 11899 - RNA, 20 nt, synthetic construct
  source 1..20: mol_type = other RNA
gctatgcagggtggaggaag

SEQ ID NO: 11900 - RNA, 20 nt, synthetic construct
  source 1..20: mol_type = other RNA
gctcagactagggaagaggt

SEQ ID NO: 11901 - RNA, 20 nt, synthetic construct
  source 1..20: mol_type = other RNA
gctcaggcttccctgtcccc

SEQ ID NO: 11902 - RNA, 20 nt, synthetic construct
  source 1..20: mol_type = other RNA
gctcaggttctgggagaggg

SEQ ID NO: 11903 - RNA, 20 nt, synthetic construct
  source 1..20: mol_type = other RNA
gctcagtctgaagagcagag

SEQ ID NO: 11904 - RNA, 20 nt, synthetic construct
  source 1..20: mol_type = other RNA
gctcagtggaaaccacgaaa

SEQ ID NO: 11905 - RNA, 20 nt, synthetic construct
  source 1..20: mol_type = other RNA
gctccagcccctcctactct

SEQ ID NO: 11906 - RNA, 20 nt, synthetic construct
  source 1..20: mol_type = other RNA
gctccaggcctcctgggata

SEQ ID NO: 11907 - RNA, 20 nt, synthetic construct
  source 1..20: mol_type = other RNA
gctccagttcaggtcccgga

SEQ ID NO: 11908 - RNA, 20 nt, synthetic construct
  source 1..20: mol_type = other RNA
gctcccctgcttcttggcca

SEQ ID NO: 11909 - RNA, 20 nt, synthetic construct
  source 1..20: mol_type = other RNA
gctccctcccgcctcctcca

SEQ ID NO: 11910 - RNA, 20 nt, synthetic construct
  source 1..20: mol_type = other RNA
gctccctctggagtcccgac

SEQ ID NO: 11911 - RNA, 20 nt, synthetic construct
  source 1..20: mol_type = other RNA
gctccgggacctgaactgga

SEQ ID NO: 11912 - RNA, 20 nt, synthetic construct
  source 1..20: mol_type = other RNA
gctcctgggtttgagagagg

SEQ ID NO: 11913 - RNA, 20 nt, synthetic construct
  source 1..20: mol_type = other RNA
gctcggaaaccaccccagca

SEQ ID NO: 11914 - RNA, 20 nt, synthetic construct
  source 1..20: mol_type = other RNA
gctcgtttatttccacccag

SEQ ID NO: 11915 - RNA, 20 nt, synthetic construct
  source 1..20: mol_type = other RNA
gctctcctgccccttcccta

SEQ ID NO: 11916 - RNA, 20 nt, synthetic construct
  source 1..20: mol_type = other RNA
gctctccttgcccccctccc

SEQ ID NO: 11917 - RNA, 20 nt, synthetic construct
  source 1..20: mol_type = other RNA
gctctgaaggaggaggggct

SEQ ID NO: 11918 - RNA, 20 nt, synthetic construct
  source 1..20: mol_type = other RNA
gctctgacgcggccgtctgg

SEQ ID NO: 11919 - RNA, 20 nt, synthetic construct
  source 1..20: mol_type = other RNA
gctctgctcttcagactgag

SEQ ID NO: 11920 - RNA, 20 nt, synthetic construct
  source 1..20: mol_type = other RNA
gctctgggcggaggaatatg

SEQ ID NO: 11921 - RNA, 20 nt, synthetic construct
  source 1..20: mol_type = other RNA
gctctgggcttctgggtttg

SEQ ID NO: 11922 - RNA, 20 nt, synthetic construct
  source 1..20: mol_type = other RNA
gctcttcacctttctagtcc

SEQ ID NO: 11923 - RNA, 20 nt, synthetic construct
  source 1..20: mol_type = other RNA
gctcttcagactgagccccg

SEQ ID NO: 11924 - RNA, 20 nt, synthetic construct
  source 1..20: mol_type = other RNA
gctcttctctgttcagccct

SEQ ID NO: 11925 - RNA, 20 nt, synthetic construct
  source 1..20: mol_type = other RNA
gctcttggccctcgtagctc

SEQ ID NO: 11926 - RNA, 20 nt, synthetic construct
  source 1..20: mol_type = other RNA
gctgaacagagaagagctgg

SEQ ID NO: 11927 - RNA, 20 nt, synthetic construct
  source 1..20: mol_type = other RNA
gctgacacgggccaccgttt

SEQ ID NO: 11928 - RNA, 20 nt, synthetic construct
  source 1..20: mol_type = other RNA
gctgaggaaggagtgaagct

SEQ ID NO: 11929 - RNA, 20 nt, synthetic construct
  source 1..20: mol_type = other RNA
gctgcacacctgtgtgcctg

SEQ ID NO: 11930 - RNA, 20 nt, synthetic construct
  source 1..20: mol_type = other RNA
gctgcagcaccaggatcagt

SEQ ID NO: 11931 - RNA, 20 nt, synthetic construct
  source 1..20: mol_type = other RNA
gctgcagcttccttacactt

SEQ ID NO: 11932 - RNA, 20 nt, synthetic construct
  source 1..20: mol_type = other RNA
gctgcagggccccgtgcaga

SEQ ID NO: 11933 - RNA, 20 nt, synthetic construct
  source 1..20: mol_type = other RNA
gctgcccatctggaggaggc

SEQ ID NO: 11934 - RNA, 20 nt, synthetic construct
  source 1..20: mol_type = other RNA
gctgccttttgggtggattc

SEQ ID NO: 11935 - RNA, 20 nt, synthetic construct
  source 1..20: mol_type = other RNA
gctgctctgacgcggccgtc

SEQ ID NO: 11936 - RNA, 20 nt, synthetic construct
  source 1..20: mol_type = other RNA
gctggaacctcttccctagt

SEQ ID NO: 11937 - RNA, 20 nt, synthetic construct
  source 1..20: mol_type = other RNA
gctggagccaggattcttag

SEQ ID NO: 11938 - RNA, 20 nt, synthetic construct
  source 1..20: mol_type = other RNA
gctggctactggccttatct

SEQ ID NO: 11939 - RNA, 20 nt, synthetic construct
  source 1..20: mol_type = other RNA
gctgggacagactcaggggc

SEQ ID NO: 11940 - RNA, 20 nt, synthetic construct
  source 1..20: mol_type = other RNA
gctgggcctggacccctggg

SEQ ID NO: 11941 - RNA, 20 nt, synthetic construct
  source 1..20: mol_type = other RNA
gctggggcctggactcctgg

SEQ ID NO: 11942 - RNA, 20 nt, synthetic construct
  source 1..20: mol_type = other RNA
gctggggcctggactcgtgg

SEQ ID NO: 11943 - RNA, 20 nt, synthetic construct
  source 1..20: mol_type = other RNA
gctggggcctggcctcctgg

SEQ ID NO: 11944 - RNA, 20 nt, synthetic construct
  source 1..20: mol_type = other RNA
gctgggggccaggactcctg

SEQ ID NO: 11945 - RNA, 20 nt, synthetic construct
  source 1..20: mol_type = other RNA
gctgggggcctggactcctt

SEQ ID NO: 11946 - RNA, 20 nt, synthetic construct
  source 1..20: mol_type = other RNA
gctgggggcctggacttctg

SEQ ID NO: 11947 - RNA, 20 nt, synthetic construct
  source 1..20: mol_type = other RNA
gctgggggcctgggctcctg

SEQ ID NO: 11948 - RNA, 20 nt, synthetic construct
  source 1..20: mol_type = other RNA
gctggggtggcctctcgtgg

SEQ ID NO: 11949 - RNA, 20 nt, synthetic construct
  source 1..20: mol_type = other RNA
gctggggtggtttccgagct

SEQ ID NO: 11950 - RNA, 20 nt, synthetic construct
  source 1..20: mol_type = other RNA
gctggggttcagagaggagg

SEQ ID NO: 11951 - RNA, 20 nt, synthetic construct
  source 1..20: mol_type = other RNA
gctgggtttaaggcaggagg

SEQ ID NO: 11952 - RNA, 20 nt, synthetic construct
  source 1..20: mol_type = other RNA
gctgggtttgggtcaggtct

SEQ ID NO: 11953 - RNA, 20 nt, synthetic construct
  source 1..20: mol_type = other RNA
gctggtaccctgcccccatt

SEQ ID NO: 11954 - RNA, 20 nt, synthetic construct
  source 1..20: mol_type = other RNA
gctggtcaccccacacccag

SEQ ID NO: 11955 - RNA, 20 nt, synthetic construct
  source 1..20: mol_type = other RNA
gctgtcacactccagttcac

SEQ ID NO: 11956 - RNA, 20 nt, synthetic construct
  source 1..20: mol_type = other RNA
gctgtcctgggcaaacagca

SEQ ID NO: 11957 - RNA, 20 nt, synthetic construct
  source 1..20: mol_type = other RNA
gctgtctcacccctctggga

SEQ ID NO: 11958 - RNA, 20 nt, synthetic construct
  source 1..20: mol_type = other RNA
gctgtgaaggggccgcacgt

SEQ ID NO: 11959 - RNA, 20 nt, synthetic construct
  source 1..20: mol_type = other RNA
gctgtggctgttcccaagtt

SEQ ID NO: 11960 - RNA, 20 nt, synthetic construct
  source 1..20: mol_type = other RNA
gctgtggtgaggaggggggt

SEQ ID NO: 11961 - RNA, 20 nt, synthetic construct
  source 1..20: mol_type = other RNA
gctgtgtttctcgtcctgca

SEQ ID NO: 11962 - RNA, 20 nt, synthetic construct
  source 1..20: mol_type = other RNA
gctgttcccaagttcttagg

SEQ ID NO: 11963 - RNA, 20 nt, synthetic construct
  source 1..20: mol_type = other RNA
gctgttgggtcattttcccc

SEQ ID NO: 11964 - RNA, 20 nt, synthetic construct
  source 1..20: mol_type = other RNA
gctgtttaagatacgcctgg

SEQ ID NO: 11965 - RNA, 20 nt, synthetic construct
  source 1..20: mol_type = other RNA
gctgtttgcccaggacagcc

SEQ ID NO: 11966 - RNA, 20 nt, synthetic construct
  source 1..20: mol_type = other RNA
gcttatgctgtttgcccagg

SEQ ID NO: 11967 - RNA, 20 nt, synthetic construct
  source 1..20: mol_type = other RNA
gcttcactccttcctcagct

SEQ ID NO: 11968 - RNA, 20 nt, synthetic construct
  source 1..20: mol_type = other RNA
gcttccagtgctcagactag

SEQ ID NO: 11969 - RNA, 20 nt, synthetic construct
  source 1..20: mol_type = other RNA
gcttccctaaggccctgctc

SEQ ID NO: 11970 - RNA, 20 nt, synthetic construct
  source 1..20: mol_type = other RNA
gcttccctgtcccccttcct

SEQ ID NO: 11971 - RNA, 20 nt, synthetic construct
  source 1..20: mol_type = other RNA
gcttccttacacttcccaag

SEQ ID NO: 11972 - RNA, 20 nt, synthetic construct
  source 1..20: mol_type = other RNA
gcttcgttcctgcagagtat

SEQ ID NO: 11973 - RNA, 20 nt, synthetic construct
  source 1..20: mol_type = other RNA
gcttctcatctgggtgcggg

SEQ ID NO: 11974 - RNA, 20 nt, synthetic construct
  source 1..20: mol_type = other RNA
gcttctcctcttgggaagtg

SEQ ID NO: 11975 - RNA, 20 nt, synthetic construct
  source 1..20: mol_type = other RNA
gcttctgggtttgagtcctt

SEQ ID NO: 11976 - RNA, 20 nt, synthetic construct
  source 1..20: mol_type = other RNA
gcttcttggccacgtaacct

SEQ ID NO: 11977 - RNA, 20 nt, synthetic construct
  source 1..20: mol_type = other RNA
gcttgacccttggaaggacc

SEQ ID NO: 11978 - RNA, 20 nt, synthetic construct
  source 1..20: mol_type = other RNA
gcttgccaaggactcaaacc

SEQ ID NO: 11979 - RNA, 20 nt, synthetic construct
  source 1..20: mol_type = other RNA
gcttggcaaactcactcttc

SEQ ID NO: 11980 - RNA, 20 nt, synthetic construct
  source 1..20: mol_type = other RNA
gcttggggacctgcctggag

SEQ ID NO: 11981 - RNA, 20 nt, synthetic construct
  source 1..20: mol_type = other RNA
gctttggagaggtgagggac

SEQ ID NO: 11982 - RNA, 20 nt, synthetic construct
  source 1..20: mol_type = other RNA
gcttttgtccccccaagttt

SEQ ID NO: 11983 - RNA, 20 nt, synthetic construct
  source 1..20: mol_type = other RNA
ggaaaaacaaaatcagaata

SEQ ID NO: 11984 - RNA, 20 nt, synthetic construct
  source 1..20: mol_type = other RNA
ggaaaacagggatggttggt

SEQ ID NO: 11985 - RNA, 20 nt, synthetic construct
  source 1..20: mol_type = other RNA
ggaaaactccctttgtgaga

SEQ ID NO: 11986 - RNA, 20 nt, synthetic construct
  source 1..20: mol_type = other RNA
ggaaaatgacccaacagcct

SEQ ID NO: 11987 - RNA, 20 nt, synthetic construct
  source 1..20: mol_type = other RNA
ggaaaccaccccagcagata

SEQ ID NO: 11988 - RNA, 20 nt, synthetic construct
  source 1..20: mol_type = other RNA
ggaaaccacgaaaggactcc

SEQ ID NO: 11989 - RNA, 20 nt, synthetic construct
  source 1..20: mol_type = other RNA
ggaaactcgggctgtgaagg

SEQ ID NO: 11990 - RNA, 20 nt, synthetic construct
  source 1..20: mol_type = other RNA
ggaaagaaggatggagaaag

SEQ ID NO: 11991 - RNA, 20 nt, synthetic construct
  source 1..20: mol_type = other RNA
ggaaaggcccattgctctcc

SEQ ID NO: 11992 - RNA, 20 nt, synthetic construct
  source 1..20: mol_type = other RNA
ggaaataaacgagccgagtt

SEQ ID NO: 11993 - RNA, 20 nt, synthetic construct
  source 1..20: mol_type = other RNA
ggaacaatataaattgggga

SEQ ID NO: 11994 - RNA, 20 nt, synthetic construct
  source 1..20: mol_type = other RNA
ggaacagccacagcaggggg

SEQ ID NO: 11995 - RNA, 20 nt, synthetic construct
  source 1..20: mol_type = other RNA
ggaaccccacatggtacctg

SEQ ID NO: 11996 - RNA, 20 nt, synthetic construct
  source 1..20: mol_type = other RNA
ggaacccctgtagggaaggg

SEQ ID NO: 11997 - RNA, 20 nt, synthetic construct
  source 1..20: mol_type = other RNA
ggaacctcttccctagtctg

SEQ ID NO: 11998 - RNA, 20 nt, synthetic construct
  source 1..20: mol_type = other RNA
ggaacgaagccgtgggccca

SEQ ID NO: 11999 - RNA, 20 nt, synthetic construct
  source 1..20: mol_type = other RNA
ggaacgggatgaactcggct

SEQ ID NO: 12000 - RNA, 20 nt, synthetic construct
  source 1..20: mol_type = other RNA
ggaacggggatgcaggggaa

SEQ ID NO: 12001 - RNA, 20 nt, synthetic construct
  source 1..20: mol_type = other RNA
ggaacggggctcagtctgaa

SEQ ID NO: 12002 - RNA, 20 nt, synthetic construct
  source 1..20: mol_type = other RNA
ggaagaatgagaaacggtgg

SEQ ID NO: 12003 - RNA, 20 nt, synthetic construct
  source 1..20: mol_type = other RNA
ggaagaggttccagcccctc

SEQ ID NO: 12004 - RNA, 20 nt, synthetic construct
  source 1..20: mol_type = other RNA
ggaagcctgagcgcctctcc

SEQ ID NO: 12005 - RNA, 20 nt, synthetic construct
  source 1..20: mol_type = other RNA
ggaagcgccacctgtgggtg

SEQ ID NO: 12006 - RNA, 20 nt, synthetic construct
  source 1..20: mol_type = other RNA
ggaagcgggaccctgctctg

SEQ ID NO: 12007 - RNA, 20 nt, synthetic construct
  source 1..20: mol_type = other RNA
ggaagctgcagcaccaggat

SEQ ID NO: 12008 - RNA, 20 nt, synthetic construct
  source 1..20: mol_type = other RNA
ggaaggacctggctgggttt

SEQ ID NO: 12009 - RNA, 20 nt, synthetic construct
  source 1..20: mol_type = other RNA
ggaaggagtgaagctaaact

SEQ ID NO: 12010 - RNA, 20 nt, synthetic construct
  source 1..20: mol_type = other RNA
ggaaggccaccctgtgctgg

SEQ ID NO: 12011 - RNA, 20 nt, synthetic construct
  source 1..20: mol_type = other RNA
ggaagggagggggcttctca

SEQ ID NO: 12012 - RNA, 20 nt, synthetic construct
  source 1..20: mol_type = other RNA
ggaagggctggggcctggcc

SEQ ID NO: 12013 - RNA, 20 nt, synthetic construct
  source 1..20: mol_type = other RNA
ggaaggggcaggagagccag

SEQ ID NO: 12014 - RNA, 20 nt, synthetic construct
  source 1..20: mol_type = other RNA
ggaagggggacagggaagcc

SEQ ID NO: 12015 - RNA, 20 nt, synthetic construct
  source 1..20: mol_type = other RNA
ggaagggggatgcaggggaa

SEQ ID NO: 12016 - RNA, 20 nt, synthetic construct
  source 1..20: mol_type = other RNA
ggaagtgaacggggaaggga

SEQ ID NO: 12017 - RNA, 20 nt, synthetic construct
  source 1..20: mol_type = other RNA
ggaagtgtaaggaagctgca

SEQ ID NO: 12018 - RNA, 20 nt, synthetic construct
  source 1..20: mol_type = other RNA
ggaatatgtcccagatagca

SEQ ID NO: 12019 - RNA, 20 nt, synthetic construct
  source 1..20: mol_type = other RNA
ggaatcaagagtcacccaga

SEQ ID NO: 12020 - RNA, 20 nt, synthetic construct
  source 1..20: mol_type = other RNA
ggaatccctcctctctgaac

SEQ ID NO: 12021 - RNA, 20 nt, synthetic construct
  source 1..20: mol_type = other RNA
ggaatgggggcagggtacca

SEQ ID NO: 12022 - RNA, 20 nt, synthetic construct
  source 1..20: mol_type = other RNA
ggacaaaagccgaagtccag

SEQ ID NO: 12023 - RNA, 20 nt, synthetic construct
  source 1..20: mol_type = other RNA
ggacacccccctcctcacca

SEQ ID NO: 12024 - RNA, 20 nt, synthetic construct
  source 1..20: mol_type = other RNA
ggacacggtgctaggacagt

SEQ ID NO: 12025 - RNA, 20 nt, synthetic construct
  source 1..20: mol_type = other RNA
ggacactgggtgggctccgg

SEQ ID NO: 12026 - RNA, 20 nt, synthetic construct
  source 1..20: mol_type = other RNA
ggacagactcaggggcctgg

SEQ ID NO: 12027 - RNA, 20 nt, synthetic construct
  source 1..20: mol_type = other RNA
ggacagcctagttttagcac

SEQ ID NO: 12028 - RNA, 20 nt, synthetic construct
  source 1..20: mol_type = other RNA
ggacagggaagcctgagcgc

SEQ ID NO: 12029 - RNA, 20 nt, synthetic construct
  source 1..20: mol_type = other RNA
ggacagtggggaaaatgacc

SEQ ID NO: 12030 - RNA, 20 nt, synthetic construct
  source 1..20: mol_type = other RNA
ggacatattcctccgcccag

SEQ ID NO: 12031 - RNA, 20 nt, synthetic construct
  source 1..20: mol_type = other RNA
ggaccaacttattctgattt

SEQ ID NO: 12032 - RNA, 20 nt, synthetic construct
  source 1..20: mol_type = other RNA
ggacccaggagtccaggccc

SEQ ID NO: 12033 - RNA, 20 nt, synthetic construct
  source 1..20: mol_type = other RNA
ggaccccacgagaggccacc

SEQ ID NO: 12034 - RNA, 20 nt, synthetic construct
  source 1..20: mol_type = other RNA
ggacccctaagggaagaatg

SEQ ID NO: 12035 - RNA, 20 nt, synthetic construct
  source 1..20: mol_type = other RNA
ggacccctgggtctgaatgg

SEQ ID NO: 12036 - RNA, 20 nt, synthetic construct
  source 1..20: mol_type = other RNA
ggaccctgctctgggcggag

SEQ ID NO: 12037 - RNA, 20 nt, synthetic construct
  source 1..20: mol_type = other RNA
ggacctgaactggagctgag

SEQ ID NO: 12038 - RNA, 20 nt, synthetic construct
  source 1..20: mol_type = other RNA
ggacctgcccagtacaggca

SEQ ID NO: 12039 - RNA, 20 nt, synthetic construct
  source 1..20: mol_type = other RNA
ggacctgcctggagaaggat

SEQ ID NO: 12040 - RNA, 20 nt, synthetic construct
  source 1..20: mol_type = other RNA
ggacctggctgggtttaagg

SEQ ID NO: 12041 - RNA, 20 nt, synthetic construct
  source 1..20: mol_type = other RNA
ggacgagaaacacagcccca

SEQ ID NO: 12042 - RNA, 20 nt, synthetic construct
  source 1..20: mol_type = other RNA
ggacgaggaagggggacagg

SEQ ID NO: 12043 - RNA, 20 nt, synthetic construct
  source 1..20: mol_type = other RNA
ggacgcaccattctcacaaa

SEQ ID NO: 12044 - RNA, 20 nt, synthetic construct
  source 1..20: mol_type = other RNA
ggacggggctggctactggc

SEQ ID NO: 12045 - RNA, 20 nt, synthetic construct
  source 1..20: mol_type = other RNA
ggactagaaaggtgaagagc

SEQ ID NO: 12046 - RNA, 20 nt, synthetic construct
  source 1..20: mol_type = other RNA
ggactcaaacccagaagccc

SEQ ID NO: 12047 - RNA, 20 nt, synthetic construct
  source 1..20: mol_type = other RNA
ggactccagagggagccacg

SEQ ID NO: 12048 - RNA, 20 nt, synthetic construct
  source 1..20: mol_type = other RNA
ggactccagagtccaggccc

SEQ ID NO: 12049 - RNA, 20 nt, synthetic construct
  source 1..20: mol_type = other RNA
ggactcccagaggggtgaga

SEQ ID NO: 12050 - RNA, 20 nt, synthetic construct
  source 1..20: mol_type = other RNA
ggactcctggctatctgcaa

SEQ ID NO: 12051 - RNA, 20 nt, synthetic construct
  source 1..20: mol_type = other RNA
ggactcctggctctgaagga

SEQ ID NO: 12052 - RNA, 20 nt, synthetic construct
  source 1..20: mol_type = other RNA
ggactcctgggtctgagggt

SEQ ID NO: 12053 - RNA, 20 nt, synthetic construct
  source 1..20: mol_type = other RNA
ggactccttcatctgagggc

SEQ ID NO: 12054 - RNA, 20 nt, synthetic construct
  source 1..20: mol_type = other RNA
ggactctggagtccctggtg

SEQ ID NO: 12055 - RNA, 20 nt, synthetic construct
  source 1..20: mol_type = other RNA
ggactctttaaggaaagaag

SEQ ID NO: 12056 - RNA, 20 nt, synthetic construct
  source 1..20: mol_type = other RNA
ggactgagggtttcagtgct

SEQ ID NO: 12057 - RNA, 20 nt, synthetic construct
  source 1..20: mol_type = other RNA
ggactgggggcctggactcc

SEQ ID NO: 12058 - RNA, 20 nt, synthetic construct
  source 1..20: mol_type = other RNA
ggacttcggcttttgtcccc

SEQ ID NO: 12059 - RNA, 20 nt, synthetic construct
  source 1..20: mol_type = other RNA
ggacttctgggtcttaggga

SEQ ID NO: 12060 - RNA, 20 nt, synthetic construct
  source 1..20: mol_type = other RNA
ggacttgccccaggccttgt

SEQ ID NO: 12061 - RNA, 20 nt, synthetic construct
  source 1..20: mol_type = other RNA
ggacttggggggtaatttat

SEQ ID NO: 12062 - RNA, 20 nt, synthetic construct
  source 1..20: mol_type = other RNA
ggagaaactggccgggaatc

SEQ ID NO: 12063 - RNA, 20 nt, synthetic construct
  source 1..20: mol_type = other RNA
ggagaaagagaaagggagta

SEQ ID NO: 12064 - RNA, 20 nt, synthetic construct
  source 1..20: mol_type = other RNA
ggagaagcagtttggaaaaa

SEQ ID NO: 12065 - RNA, 20 nt, synthetic construct
  source 1..20: mol_type = other RNA
ggagaaggatgcaggacgag

SEQ ID NO: 12066 - RNA, 20 nt, synthetic construct
  source 1..20: mol_type = other RNA
ggagaatccacccaaaaggc

SEQ ID NO: 12067 - RNA, 20 nt, synthetic construct
  source 1..20: mol_type = other RNA
ggagagcaatgggcctttcc

SEQ ID NO: 12068 - RNA, 20 nt, synthetic construct
  source 1..20: mol_type = other RNA
ggagagccaggggcatgaga

SEQ ID NO: 12069 - RNA, 20 nt, synthetic construct
  source 1..20: mol_type = other RNA
ggagaggcgctcaggcttcc

SEQ ID NO: 12070 - RNA, 20 nt, synthetic construct
  source 1..20: mol_type = other RNA
ggagaggctgggggcctgga

SEQ ID NO: 12071 - RNA, 20 nt, synthetic construct
  source 1..20: mol_type = other RNA
ggagagggtagcgcagggtg

SEQ ID NO: 12072 - RNA, 20 nt, synthetic construct
  source 1..20: mol_type = other RNA
ggagaggtgagggacttggg

SEQ ID NO: 12073 - RNA, 20 nt, synthetic construct
  source 1..20: mol_type = other RNA
ggagcattggggtgggctgg

SEQ ID NO: 12074 - RNA, 20 nt, synthetic construct
  source 1..20: mol_type = other RNA
ggagccacgaaaacagatcc

SEQ ID NO: 12075 - RNA, 20 nt, synthetic construct
  source 1..20: mol_type = other RNA
ggagccaggattcttagggc

SEQ ID NO: 12076 - RNA, 20 nt, synthetic construct
  source 1..20: mol_type = other RNA
ggagcccacccagtgtccac

SEQ ID NO: 12077 - RNA, 20 nt, synthetic construct
  source 1..20: mol_type = other RNA
ggagcccaggcccccagctc

SEQ ID NO: 12078 - RNA, 20 nt, synthetic construct
  source 1..20: mol_type = other RNA
ggagctacgagggccaagag

SEQ ID NO: 12079 - RNA, 20 nt, synthetic construct
  source 1..20: mol_type = other RNA
ggagctgaggaaggagtgaa

SEQ ID NO: 12080 - RNA, 20 nt, synthetic construct
  source 1..20: mol_type = other RNA
ggagctgggtttgggtcagg

SEQ ID NO: 12081 - RNA, 20 nt, synthetic construct
  source 1..20: mol_type = other RNA
ggaggaacaatataaattgg

SEQ ID NO: 12082 - RNA, 20 nt, synthetic construct
  source 1..20: mol_type = other RNA
ggaggaaggccaccctgtgc

SEQ ID NO: 12083 - RNA, 20 nt, synthetic construct
  source 1..20: mol_type = other RNA
ggaggaatatgtcccagata

SEQ ID NO: 12084 - RNA, 20 nt, synthetic construct
  source 1..20: mol_type = other RNA
ggaggagaatccacccaaaa

SEQ ID NO: 12085 - RNA, 20 nt, synthetic construct
  source 1..20: mol_type = other RNA
ggaggaggcgggagggagct

SEQ ID NO: 12086 - RNA, 20 nt, synthetic construct
  source 1..20: mol_type = other RNA
ggaggagggacttgccccag

SEQ ID NO: 12087 - RNA, 20 nt, synthetic construct
  source 1..20: mol_type = other RNA
ggaggaggggctggaacctc

SEQ ID NO: 12088 - RNA, 20 nt, synthetic construct
  source 1..20: mol_type = other RNA
ggaggaggggctggggcctg

SEQ ID NO: 12089 - RNA, 20 nt, synthetic construct
  source 1..20: mol_type = other RNA
ggaggccaggccccagccct

SEQ ID NO: 12090 - RNA, 20 nt, synthetic construct
  source 1..20: mol_type = other RNA
ggaggcctggagcattgggg

SEQ ID NO: 12091 - RNA, 20 nt, synthetic construct
  source 1..20: mol_type = other RNA
ggaggcgggagggagctacg

SEQ ID NO: 12092 - RNA, 20 nt, synthetic construct
  source 1..20: mol_type = other RNA
ggagggacttgccccaggcc

SEQ ID NO: 12093 - RNA, 20 nt, synthetic construct
  source 1..20: mol_type = other RNA
ggagggagctacgagggcca

SEQ ID NO: 12094 - RNA, 20 nt, synthetic construct
  source 1..20: mol_type = other RNA
ggagggattcccttctcagg

SEQ ID NO: 12095 - RNA, 20 nt, synthetic construct
  source 1..20: mol_type = other RNA
ggaggggctggaacctcttc

SEQ ID NO: 12096 - RNA, 20 nt, synthetic construct
  source 1..20: mol_type = other RNA
ggaggggctggagccaggat

SEQ ID NO: 12097 - RNA, 20 nt, synthetic construct
  source 1..20: mol_type = other RNA
ggaggggctggggcctggac

SEQ ID NO: 12098 - RNA, 20 nt, synthetic construct
  source 1..20: mol_type = other RNA
ggaggggctgggggccagga

SEQ ID NO: 12099 - RNA, 20 nt, synthetic construct
  source 1..20: mol_type = other RNA
ggagggggcttctcatctgg

SEQ ID NO: 12100 - RNA, 20 nt, synthetic construct
  source 1..20: mol_type = other RNA
ggaggggggcaaggagagca

SEQ ID NO: 12101 - RNA, 20 nt, synthetic construct
  source 1..20: mol_type = other RNA
ggaggggggtgtccgtgtgg

SEQ ID NO: 12102 - RNA, 20 nt, synthetic construct
  source 1..20: mol_type = other RNA
ggaggggttgggcctggact

SEQ ID NO: 12103 - RNA, 20 nt, synthetic construct
  source 1..20: mol_type = other RNA
ggagtagaggcggccacgac

SEQ ID NO: 12104 - RNA, 20 nt, synthetic construct
  source 1..20: mol_type = other RNA
ggagtccaggcccccagcct

SEQ ID NO: 12105 - RNA, 20 nt, synthetic construct
  source 1..20: mol_type = other RNA
ggagtccaggcccccagtcc

SEQ ID NO: 12106 - RNA, 20 nt, synthetic construct
  source 1..20: mol_type = other RNA
ggagtcccgacttgctggga

SEQ ID NO: 12107 - RNA, 20 nt, synthetic construct
  source 1..20: mol_type = other RNA
ggagtcccgcccaggcccct

SEQ ID NO: 12108 - RNA, 20 nt, synthetic construct
  source 1..20: mol_type = other RNA
ggagtccctggtgcccaggc

SEQ ID NO: 12109 - RNA, 20 nt, synthetic construct
  source 1..20: mol_type = other RNA
ggagtcctggcccccagccc

SEQ ID NO: 12110 - RNA, 20 nt, synthetic construct
  source 1..20: mol_type = other RNA
ggagtcctttcgtggtttcc

SEQ ID NO: 12111 - RNA, 20 nt, synthetic construct
  source 1..20: mol_type = other RNA
ggagtgaagctaaactccta

SEQ ID NO: 12112 - RNA, 20 nt, synthetic construct
  source 1..20: mol_type = other RNA
ggagtgtgacagcctggggc

SEQ ID NO: 12113 - RNA, 20 nt, synthetic construct
  source 1..20: mol_type = other RNA
ggagtttagcttcactcctt

SEQ ID NO: 12114 - RNA, 20 nt, synthetic construct
  source 1..20: mol_type = other RNA
ggagttttccacacggacac

SEQ ID NO: 12115 - RNA, 20 nt, synthetic construct
  source 1..20: mol_type = other RNA
ggataaattaccccccaagt

SEQ ID NO: 12116 - RNA, 20 nt, synthetic construct
  source 1..20: mol_type = other RNA
ggataccccgaagagtgagt

SEQ ID NO: 12117 - RNA, 20 nt, synthetic construct
  source 1..20: mol_type = other RNA
ggatcagtgaaacgcaccag

SEQ ID NO: 12118 - RNA, 20 nt, synthetic construct
  source 1..20: mol_type = other RNA
ggatctaggagtttagcttc

SEQ ID NO: 12119 - RNA, 20 nt, synthetic construct
  source 1..20: mol_type = other RNA
ggatctgttttcgtggctcc

SEQ ID NO: 12120 - RNA, 20 nt, synthetic construct
  source 1..20: mol_type = other RNA
ggatgaactcggctcgttta

SEQ ID NO: 12121 - RNA, 20 nt, synthetic construct
  source 1..20: mol_type = other RNA
ggatgcaggacgagaaacac

SEQ ID NO: 12122 - RNA, 20 nt, synthetic construct
  source 1..20: mol_type = other RNA
ggatgcaggggaacggggat

SEQ ID NO: 12123 - RNA, 20 nt, synthetic construct
  source 1..20: mol_type = other RNA
ggatgcaggggaacggggct

SEQ ID NO: 12124 - RNA, 20 nt, synthetic construct
  source 1..20: mol_type = other RNA
ggatgcaggggaagggggat

SEQ ID NO: 12125 - RNA, 20 nt, synthetic construct
  source 1..20: mol_type = other RNA
ggatgcctgtactgggcagg

SEQ ID NO: 12126 - RNA, 20 nt, synthetic construct
  source 1..20: mol_type = other RNA
ggatgcgtgacctgcccggt

SEQ ID NO: 12127 - RNA, 20 nt, synthetic construct
  source 1..20: mol_type = other RNA
ggatggagaaagagaaaggg

SEQ ID NO: 12128 - RNA, 20 nt, synthetic construct
  source 1..20: mol_type = other RNA
ggatggttggtcactgtctc

SEQ ID NO: 12129 - RNA, 20 nt, synthetic construct
  source 1..20: mol_type = other RNA
ggattcccttctcaggttac

SEQ ID NO: 12130 - RNA, 20 nt, synthetic construct
  source 1..20: mol_type = other RNA
ggattctcctccaactgtgg

SEQ ID NO: 12131 - RNA, 20 nt, synthetic construct
  source 1..20: mol_type = other RNA
ggattcttagggctgaacag

SEQ ID NO: 12132 - RNA, 20 nt, synthetic construct
  source 1..20: mol_type = other RNA
ggcaaaacccccgtcaccac

SEQ ID NO: 12133 - RNA, 20 nt, synthetic construct
  source 1..20: mol_type = other RNA
ggcaaacagcataagctggt

SEQ ID NO: 12134 - RNA, 20 nt, synthetic construct
  source 1..20: mol_type = other RNA
ggcaaactcactcttcgggg

SEQ ID NO: 12135 - RNA, 20 nt, synthetic construct
  source 1..20: mol_type = other RNA
ggcaaccaggcgtatcttaa

SEQ ID NO: 12136 - RNA, 20 nt, synthetic construct
  source 1..20: mol_type = other RNA
ggcaagcccaggagaggcgc

SEQ ID NO: 12137 - RNA, 20 nt, synthetic construct
  source 1..20: mol_type = other RNA
ggcaaggagagcaatgggcc

SEQ ID NO: 12138 - RNA, 20 nt, synthetic construct
  source 1..20: mol_type = other RNA
ggcaagtccctcctccgacc

SEQ ID NO: 12139 - RNA, 20 nt, synthetic construct
  source 1..20: mol_type = other RNA
ggcaattggggtgcaggaat

SEQ ID NO: 12140 - RNA, 20 nt, synthetic construct
  source 1..20: mol_type = other RNA
ggcacacaggtgtgcagctg

SEQ ID NO: 12141 - RNA, 20 nt, synthetic construct
  source 1..20: mol_type = other RNA
ggcaccagggactccagagt

SEQ ID NO: 12142 - RNA, 20 nt, synthetic construct
  source 1..20: mol_type = other RNA
ggcacgtgcggccccttcac

SEQ ID NO: 12143 - RNA, 20 nt, synthetic construct
  source 1..20: mol_type = other RNA
ggcagcctggtagacagggc

SEQ ID NO: 12144 - RNA, 20 nt, synthetic construct
  source 1..20: mol_type = other RNA
ggcagctttggagaggtgag

SEQ ID NO: 12145 - RNA, 20 nt, synthetic construct
  source 1..20: mol_type = other RNA
ggcaggagagccaggggcat

SEQ ID NO: 12146 - RNA, 20 nt, synthetic construct
  source 1..20: mol_type = other RNA
ggcaggaggggctgggggcc

SEQ ID NO: 12147 - RNA, 20 nt, synthetic construct
  source 1..20: mol_type = other RNA
ggcagggctgtggtgaggag

SEQ ID NO: 12148 - RNA, 20 nt, synthetic construct
  source 1..20: mol_type = other RNA
ggcagggtaccagcctcacc

SEQ ID NO: 12149 - RNA, 20 nt, synthetic construct
  source 1..20: mol_type = other RNA
ggcaggtccccaagcatcgc

SEQ ID NO: 12150 - RNA, 20 nt, synthetic construct
  source 1..20: mol_type = other RNA
ggcaggtccttgaaagggaa

SEQ ID NO: 12151 - RNA, 20 nt, synthetic construct
  source 1..20: mol_type = other RNA
ggcatccctgtgaaagatgc

SEQ ID NO: 12152 - RNA, 20 nt, synthetic construct
  source 1..20: mol_type = other RNA
ggcatctttcacagggatgc

SEQ ID NO: 12153 - RNA, 20 nt, synthetic construct
  source 1..20: mol_type = other RNA
ggcatgagatggtggacgag

SEQ ID NO: 12154 - RNA, 20 nt, synthetic construct
  source 1..20: mol_type = other RNA
ggccaagaagcaggggagct

SEQ ID NO: 12155 - RNA, 20 nt, synthetic construct
  source 1..20: mol_type = other RNA
ggccaagagcatgaggtcat

SEQ ID NO: 12156 - RNA, 20 nt, synthetic construct
  source 1..20: mol_type = other RNA
ggccaagtaggtggcctggg

SEQ ID NO: 12157 - RNA, 20 nt, synthetic construct
  source 1..20: mol_type = other RNA
ggccaccccagccctgtcta

SEQ ID NO: 12158 - RNA, 20 nt, synthetic construct
  source 1..20: mol_type = other RNA
ggccaccctgcgctaccctc

SEQ ID NO: 12159 - RNA, 20 nt, synthetic construct
  source 1..20: mol_type = other RNA
ggccaccctgtgctgggaca

SEQ ID NO: 12160 - RNA, 20 nt, synthetic construct
  source 1..20: mol_type = other RNA
ggccaccgtttctcattctt

SEQ ID NO: 12161 - RNA, 20 nt, synthetic construct
  source 1..20: mol_type = other RNA
ggccacctacttggcctgga

SEQ ID NO: 12162 - RNA, 20 nt, synthetic construct
  source 1..20: mol_type = other RNA
ggccacgacctggtgaacac

SEQ ID NO: 12163 - RNA, 20 nt, synthetic construct
  source 1..20: mol_type = other RNA
ggccacgtaacctgagaagg

SEQ ID NO: 12164 - RNA, 20 nt, synthetic construct
  source 1..20: mol_type = other RNA
ggccactgagaaccgggcag

SEQ ID NO: 12165 - RNA, 20 nt, synthetic construct
  source 1..20: mol_type = other RNA
ggccactggctgtttaagat

SEQ ID NO: 12166 - RNA, 20 nt, synthetic construct
  source 1..20: mol_type = other RNA
ggccagaggctgttgggtca

SEQ ID NO: 12167 - RNA, 20 nt, synthetic construct
  source 1..20: mol_type = other RNA
ggccaggactcctggctctg

SEQ ID NO: 12168 - RNA, 20 nt, synthetic construct
  source 1..20: mol_type = other RNA
ggccaggccccagcccttcc

SEQ ID NO: 12169 - RNA, 20 nt, synthetic construct
  source 1..20: mol_type = other RNA
ggccaggccttcagtgctca

SEQ ID NO: 12170 - RNA, 20 nt, synthetic construct
  source 1..20: mol_type = other RNA
ggccagtagccagccccgtc

SEQ ID NO: 12171 - RNA, 20 nt, synthetic construct
  source 1..20: mol_type = other RNA
ggccagtttctccacctggg

SEQ ID NO: 12172 - RNA, 20 nt, synthetic construct
  source 1..20: mol_type = other RNA
ggcccaacccctccccattc

SEQ ID NO: 12173 - RNA, 20 nt, synthetic construct
  source 1..20: mol_type = other RNA
ggcccacggcttcgttcctg

SEQ ID NO: 12174 - RNA, 20 nt, synthetic construct
  source 1..20: mol_type = other RNA
ggcccagccccgcctcccta

SEQ ID NO: 12175 - RNA, 20 nt, synthetic construct
  source 1..20: mol_type = other RNA
ggcccaggcacacaggtgtg

SEQ ID NO: 12176 - RNA, 20 nt, synthetic construct
  source 1..20: mol_type = other RNA
ggcccagggctatgcagggt

SEQ ID NO: 12177 - RNA, 20 nt, synthetic construct
  source 1..20: mol_type = other RNA
ggcccattgctctccttgcc

SEQ ID NO: 12178 - RNA, 20 nt, synthetic construct
  source 1..20: mol_type = other RNA
ggccccagcccctcctctct

SEQ ID NO: 12179 - RNA, 20 nt, synthetic construct
  source 1..20: mol_type = other RNA
ggccccagcccttccgccct

SEQ ID NO: 12180 - RNA, 20 nt, synthetic construct
  source 1..20: mol_type = other RNA
ggccccaggccacctacttg

SEQ ID NO: 12181 - RNA, 20 nt, synthetic construct
  source 1..20: mol_type = other RNA
ggccccaggctgtcacactc

SEQ ID NO: 12182 - RNA, 20 nt, synthetic construct
  source 1..20: mol_type = other RNA
ggcccccagcccctcctgcc

SEQ ID NO: 12183 - RNA, 20 nt, synthetic construct
  source 1..20: mol_type = other RNA
ggcccccagcctctccccat

SEQ ID NO: 12184 - RNA, 20 nt, synthetic construct
  source 1..20: mol_type = other RNA
ggcccccagctcttctctgt

SEQ ID NO: 12185 - RNA, 20 nt, synthetic construct
  source 1..20: mol_type = other RNA
ggcccccagtccctccaccc

SEQ ID NO: 12186 - RNA, 20 nt, synthetic construct
  source 1..20: mol_type = other RNA
ggccccgtgcagagggggcc

SEQ ID NO: 12187 - RNA, 20 nt, synthetic construct
  source 1..20: mol_type = other RNA
ggcccctgagtctgtcccag

SEQ ID NO: 12188 - RNA, 20 nt, synthetic construct
  source 1..20: mol_type = other RNA
ggccccttcacagcccgagt

SEQ ID NO: 12189 - RNA, 20 nt, synthetic construct
  source 1..20: mol_type = other RNA
ggcccgtgtcagcccctggc

SEQ ID NO: 12190 - RNA, 20 nt, synthetic construct
  source 1..20: mol_type = other RNA
ggccctcgtagctccctccc

SEQ ID NO: 12191 - RNA, 20 nt, synthetic construct
  source 1..20: mol_type = other RNA
ggccctgcagccaggggctg

SEQ ID NO: 12192 - RNA, 20 nt, synthetic construct
  source 1..20: mol_type = other RNA
ggccctgctctgggcttctg

SEQ ID NO: 12193 - RNA, 20 nt, synthetic construct
  source 1..20: mol_type = other RNA
ggccgcacgtgccctgggaa

SEQ ID NO: 12194 - RNA, 20 nt, synthetic construct
  source 1..20: mol_type = other RNA
ggccgcctctactccctttc

SEQ ID NO: 12195 - RNA, 20 nt, synthetic construct
  source 1..20: mol_type = other RNA
ggccgcgtcagagcagctca

SEQ ID NO: 12196 - RNA, 20 nt, synthetic construct
  source 1..20: mol_type = other RNA
ggccggccaggccttcagtg

SEQ ID NO: 12197 - RNA, 20 nt, synthetic construct
  source 1..20: mol_type = other RNA
ggccggcctgaccactgggc

SEQ ID NO: 12198 - RNA, 20 nt, synthetic construct
  source 1..20: mol_type = other RNA
ggccgggaatcaagagtcac

SEQ ID NO: 12199 - RNA, 20 nt, synthetic construct
  source 1..20: mol_type = other RNA
ggccgtctggtgcgtttcac

SEQ ID NO: 12200 - RNA, 20 nt, synthetic construct
  source 1..20: mol_type = other RNA
ggcctcaggcatctttcaca

SEQ ID NO: 12201 - RNA, 20 nt, synthetic construct
  source 1..20: mol_type = other RNA
ggcctcagtgaactggagtg

SEQ ID NO: 12202 - RNA, 20 nt, synthetic construct
  source 1..20: mol_type = other RNA
ggcctcctgggataccccga

SEQ ID NO: 12203 - RNA, 20 nt, synthetic construct
  source 1..20: mol_type = other RNA
ggcctcctgggttgaatggg

SEQ ID NO: 12204 - RNA, 20 nt, synthetic construct
  source 1..20: mol_type = other RNA
ggcctctcgtggggtccagg

SEQ ID NO: 12205 - RNA, 20 nt, synthetic construct
  source 1..20: mol_type = other RNA
ggcctctgggggatgcaggg

SEQ ID NO: 12206 - RNA, 20 nt, synthetic construct
  source 1..20: mol_type = other RNA
ggcctgaccactgggcaacc

SEQ ID NO: 12207 - RNA, 20 nt, synthetic construct
  source 1..20: mol_type = other RNA
ggcctggaccccacgagagg

SEQ ID NO: 12208 - RNA, 20 nt, synthetic construct
  source 1..20: mol_type = other RNA
ggcctggacccctgggtctg

SEQ ID NO: 12209 - RNA, 20 nt, synthetic construct
  source 1..20: mol_type = other RNA
ggcctggactccttcatctg

SEQ ID NO: 12210 - RNA, 20 nt, synthetic construct
  source 1..20: mol_type = other RNA
ggcctggactctggagtccc

SEQ ID NO: 12211 - RNA, 20 nt, synthetic construct
  source 1..20: mol_type = other RNA
ggcctggacttctgggtctt

SEQ ID NO: 12212 - RNA, 20 nt, synthetic construct
  source 1..20: mol_type = other RNA
ggcctggagcattggggtgg

SEQ ID NO: 12213 - RNA, 20 nt, synthetic construct
  source 1..20: mol_type = other RNA
ggcctggccggcctgaccac

SEQ ID NO: 12214 - RNA, 20 nt, synthetic construct
  source 1..20: mol_type = other RNA
ggcctggcctcctgggttga

SEQ ID NO: 12215 - RNA, 20 nt, synthetic construct
  source 1..20: mol_type = other RNA
ggcctgggcaccagggactc

SEQ ID NO: 12216 - RNA, 20 nt, synthetic construct
  source 1..20: mol_type = other RNA
ggcctgggcgggactcccag

SEQ ID NO: 12217 - RNA, 20 nt, synthetic construct
  source 1..20: mol_type = other RNA
ggcctgggctcctgggtttg

SEQ ID NO: 12218 - RNA, 20 nt, synthetic construct
  source 1..20: mol_type = other RNA
ggcctggggcaagtccctcc

SEQ ID NO: 12219 - RNA, 20 nt, synthetic construct
  source 1..20: mol_type = other RNA
ggcctggggcctctggggga

SEQ ID NO: 12220 - RNA, 20 nt, synthetic construct
  source 1..20: mol_type = other RNA
ggccttagggaagcgggacc

SEQ ID NO: 12221 - RNA, 20 nt, synthetic construct
  source 1..20: mol_type = other RNA
ggccttatctcacaggtaaa

SEQ ID NO: 12222 - RNA, 20 nt, synthetic construct
  source 1..20: mol_type = other RNA
ggccttcagtgctcagtgga

SEQ ID NO: 12223 - RNA, 20 nt, synthetic construct
  source 1..20: mol_type = other RNA
ggccttcctccaccctgcat

SEQ ID NO: 12224 - RNA, 20 nt, synthetic construct
  source 1..20: mol_type = other RNA
ggccttgtggacactgggtg

SEQ ID NO: 12225 - RNA, 20 nt, synthetic construct
  source 1..20: mol_type = other RNA
ggcctttccctttcaaggac

SEQ ID NO: 12226 - RNA, 20 nt, synthetic construct
  source 1..20: mol_type = other RNA
ggcgataggggaggggggca

SEQ ID NO: 12227 - RNA, 20 nt, synthetic construct
  source 1..20: mol_type = other RNA
ggcgatgcttggggacctgc

SEQ ID NO: 12228 - RNA, 20 nt, synthetic construct
  source 1..20: mol_type = other RNA
ggcgctcaggcttccctgtc

SEQ ID NO: 12229 - RNA, 20 nt, synthetic construct
  source 1..20: mol_type = other RNA
ggcgcttccagtgctcagac

SEQ ID NO: 12230 - RNA, 20 nt, synthetic construct
  source 1..20: mol_type = other RNA
ggcggaagggctggggcctg

SEQ ID NO: 12231 - RNA, 20 nt, synthetic construct
  source 1..20: mol_type = other RNA
ggcggaggaatatgtcccag

SEQ ID NO: 12232 - RNA, 20 nt, synthetic construct
  source 1..20: mol_type = other RNA
ggcggccacgacctggtgaa

SEQ ID NO: 12233 - RNA, 20 nt, synthetic construct
  source 1..20: mol_type = other RNA
ggcgggactcccagaggggt

SEQ ID NO: 12234 - RNA, 20 nt, synthetic construct
  source 1..20: mol_type = other RNA
ggcgggagggagctacgagg

SEQ ID NO: 12235 - RNA, 20 nt, synthetic construct
  source 1..20: mol_type = other RNA
ggcgtatcttaaacagccag

SEQ ID NO: 12236 - RNA, 20 nt, synthetic construct
  source 1..20: mol_type = other RNA
ggctactggccttatctcac

SEQ ID NO: 12237 - RNA, 20 nt, synthetic construct
  source 1..20: mol_type = other RNA
ggctagagtaggaggggctg

SEQ ID NO: 12238 - RNA, 20 nt, synthetic construct
  source 1..20: mol_type = other RNA
ggctagggggttgggggcta

SEQ ID NO: 12239 - RNA, 20 nt, synthetic construct
  source 1..20: mol_type = other RNA
ggctatctgcaaacaggaag

SEQ ID NO: 12240 - RNA, 20 nt, synthetic construct
  source 1..20: mol_type = other RNA
ggctatgcagggtggaggaa

SEQ ID NO: 12241 - RNA, 20 nt, synthetic construct
  source 1..20: mol_type = other RNA
ggctcagtctgaagagcaga

SEQ ID NO: 12242 - RNA, 20 nt, synthetic construct
  source 1..20: mol_type = other RNA
ggctccagcccctcctactc

SEQ ID NO: 12243 - RNA, 20 nt, synthetic construct
  source 1..20: mol_type = other RNA
ggctccctctggagtcccga

SEQ ID NO: 12244 - RNA, 20 nt, synthetic construct
  source 1..20: mol_type = other RNA
ggctccgggacctgaactgg

SEQ ID NO: 12245 - RNA, 20 nt, synthetic construct
  source 1..20: mol_type = other RNA
ggctcctgggtttgagagag

SEQ ID NO: 12246 - RNA, 20 nt, synthetic construct
  source 1..20: mol_type = other RNA
ggctcgtttatttccaccca

SEQ ID NO: 12247 - RNA, 20 nt, synthetic construct
  source 1..20: mol_type = other RNA
ggctctcctgccccttccct

SEQ ID NO: 12248 - RNA, 20 nt, synthetic construct
  source 1..20: mol_type = other RNA
ggctctgaaggaggaggggc

SEQ ID NO: 12249 - RNA, 20 nt, synthetic construct
  source 1..20: mol_type = other RNA
ggctctgctcttcagactga

SEQ ID NO: 12250 - RNA, 20 nt, synthetic construct
  source 1..20: mol_type = other RNA
ggctcttcacctttctagtc

SEQ ID NO: 12251 - RNA, 20 nt, synthetic construct
  source 1..20: mol_type = other RNA
ggctgaacagagaagagctg

SEQ ID NO: 12252 - RNA, 20 nt, synthetic construct
  source 1..20: mol_type = other RNA
ggctgacacgggccaccgtt

SEQ ID NO: 12253 - RNA, 20 nt, synthetic construct
  source 1..20: mol_type = other RNA
ggctgccttttgggtggatt

SEQ ID NO: 12254 - RNA, 20 nt, synthetic construct
  source 1..20: mol_type = other RNA
ggctggaacctcttccctag

SEQ ID NO: 12255 - RNA, 20 nt, synthetic construct
  source 1..20: mol_type = other RNA
ggctggagccaggattctta

SEQ ID NO: 12256 - RNA, 20 nt, synthetic construct
  source 1..20: mol_type = other RNA
ggctggctactggccttatc

SEQ ID NO: 12257 - RNA, 20 nt, synthetic construct
  source 1..20: mol_type = other RNA
ggctgggcctggacccctgg

SEQ ID NO: 12258 - RNA, 20 nt, synthetic construct
  source 1..20: mol_type = other RNA
ggctggggcctggactcctg

SEQ ID NO: 12259 - RNA, 20 nt, synthetic construct
  source 1..20: mol_type = other RNA
ggctggggcctggactcgtg

SEQ ID NO: 12260 - RNA, 20 nt, synthetic construct
  source 1..20: mol_type = other RNA
ggctggggcctggcctcctg

SEQ ID NO: 12261 - RNA, 20 nt, synthetic construct
  source 1..20: mol_type = other RNA
ggctgggggccaggactcct

SEQ ID NO: 12262 - RNA, 20 nt, synthetic construct
  source 1..20: mol_type = other RNA
ggctgggggcctggactcct

SEQ ID NO: 12263 - RNA, 20 nt, synthetic construct
  source 1..20: mol_type = other RNA
ggctgggggcctggacttct

SEQ ID NO: 12264 - RNA, 20 nt, synthetic construct
  source 1..20: mol_type = other RNA
ggctggggtggcctctcgtg

SEQ ID NO: 12265 - RNA, 20 nt, synthetic construct
  source 1..20: mol_type = other RNA
ggctggggttcagagaggag

SEQ ID NO: 12266 - RNA, 20 nt, synthetic construct
  source 1..20: mol_type = other RNA
ggctgggtttaaggcaggag

SEQ ID NO: 12267 - RNA, 20 nt, synthetic construct
  source 1..20: mol_type = other RNA
ggctggtaccctgcccccat

SEQ ID NO: 12268 - RNA, 20 nt, synthetic construct
  source 1..20: mol_type = other RNA
ggctgtcacactccagttca

SEQ ID NO: 12269 - RNA, 20 nt, synthetic construct
  source 1..20: mol_type = other RNA
ggctgtcctgggcaaacagc

SEQ ID NO: 12270 - RNA, 20 nt, synthetic construct
  source 1..20: mol_type = other RNA
ggctgtgaaggggccgcacg

SEQ ID NO: 12271 - RNA, 20 nt, synthetic construct
  source 1..20: mol_type = other RNA
ggctgtggtgaggagggggg

SEQ ID NO: 12272 - RNA, 20 nt, synthetic construct
  source 1..20: mol_type = other RNA
ggctgtgtttctcgtcctgc

SEQ ID NO: 12273 - RNA, 20 nt, synthetic construct
  source 1..20: mol_type = other RNA
ggctgttcccaagttcttag

SEQ ID NO: 12274 - RNA, 20 nt, synthetic construct
  source 1..20: mol_type = other RNA
ggctgttgggtcattttccc

SEQ ID NO: 12275 - RNA, 20 nt, synthetic construct
  source 1..20: mol_type = other RNA
ggctgtttaagatacgcctg

SEQ ID NO: 12276 - RNA, 20 nt, synthetic construct
  source 1..20: mol_type = other RNA
ggcttccctgtcccccttcc

SEQ ID NO: 12277 - RNA, 20 nt, synthetic construct
  source 1..20: mol_type = other RNA
ggcttcgttcctgcagagta

SEQ ID NO: 12278 - RNA, 20 nt, synthetic construct
  source 1..20: mol_type = other RNA
ggcttctcatctgggtgcgg

SEQ ID NO: 12279 - RNA, 20 nt, synthetic construct
  source 1..20: mol_type = other RNA
ggcttctgggtttgagtcct

SEQ ID NO: 12280 - RNA, 20 nt, synthetic construct
  source 1..20: mol_type = other RNA
ggcttgccaaggactcaaac

SEQ ID NO: 12281 - RNA, 20 nt, synthetic construct
  source 1..20: mol_type = other RNA
ggcttttgtccccccaagtt

SEQ ID NO: 12282 - RNA, 20 nt, synthetic construct
  source 1..20: mol_type = other RNA
gggaaaatgacccaacagcc

SEQ ID NO: 12283 - RNA, 20 nt, synthetic construct
  source 1..20: mol_type = other RNA
gggaaaggcccattgctctc

SEQ ID NO: 12284 - RNA, 20 nt, synthetic construct
  source 1..20: mol_type = other RNA
gggaacagccacagcagggg

SEQ ID NO: 12285 - RNA, 20 nt, synthetic construct
  source 1..20: mol_type = other RNA
gggaaccccacatggtacct

SEQ ID NO: 12286 - RNA, 20 nt, synthetic construct
  source 1..20: mol_type = other RNA
gggaacgggatgaactcggc

SEQ ID NO: 12287 - RNA, 20 nt, synthetic construct
  source 1..20: mol_type = other RNA
gggaacggggatgcagggga

SEQ ID NO: 12288 - RNA, 20 nt, synthetic construct
  source 1..20: mol_type = other RNA
gggaacggggctcagtctga

SEQ ID NO: 12289 - RNA, 20 nt, synthetic construct
  source 1..20: mol_type = other RNA
gggaagaatgagaaacggtg

SEQ ID NO: 12290 - RNA, 20 nt, synthetic construct
  source 1..20: mol_type = other RNA
gggaagaggttccagcccct

SEQ ID NO: 12291 - RNA, 20 nt, synthetic construct
  source 1..20: mol_type = other RNA
gggaagcctgagcgcctctc

SEQ ID NO: 12292 - RNA, 20 nt, synthetic construct
  source 1..20: mol_type = other RNA
gggaagcgggaccctgctct

SEQ ID NO: 12293 - RNA, 20 nt, synthetic construct
  source 1..20: mol_type = other RNA
gggaagggagggggcttctc

SEQ ID NO: 12294 - RNA, 20 nt, synthetic construct
  source 1..20: mol_type = other RNA
gggaaggggcaggagagcca

SEQ ID NO: 12295 - RNA, 20 nt, synthetic construct
  source 1..20: mol_type = other RNA
gggaagggggatgcagggga

SEQ ID NO: 12296 - RNA, 20 nt, synthetic construct
  source 1..20: mol_type = other RNA
gggaagtgtaaggaagctgc

SEQ ID NO: 12297 - RNA, 20 nt, synthetic construct
  source 1..20: mol_type = other RNA
gggaatcaagagtcacccag

SEQ ID NO: 12298 - RNA, 20 nt, synthetic construct
  source 1..20: mol_type = other RNA
gggaatccctcctctctgaa

SEQ ID NO: 12299 - RNA, 20 nt, synthetic construct
  source 1..20: mol_type = other RNA
gggacaaaagccgaagtcca

SEQ ID NO: 12300 - RNA, 20 nt, synthetic construct
  source 1..20: mol_type = other RNA
gggacacggtgctaggacag

SEQ ID NO: 12301 - RNA, 20 nt, synthetic construct
  source 1..20: mol_type = other RNA
gggacagactcaggggcctg

SEQ ID NO: 12302 - RNA, 20 nt, synthetic construct
  source 1..20: mol_type = other RNA
gggacagggaagcctgagcg

SEQ ID NO: 12303 - RNA, 20 nt, synthetic construct
  source 1..20: mol_type = other RNA
gggacatattcctccgccca

SEQ ID NO: 12304 - RNA, 20 nt, synthetic construct
  source 1..20: mol_type = other RNA
gggaccctgctctgggcgga

SEQ ID NO: 12305 - RNA, 20 nt, synthetic construct
  source 1..20: mol_type = other RNA
gggacctgaactggagctga

SEQ ID NO: 12306 - RNA, 20 nt, synthetic construct
  source 1..20: mol_type = other RNA
gggacctgcctggagaagga

SEQ ID NO: 12307 - RNA, 20 nt, synthetic construct
  source 1..20: mol_type = other RNA
gggactagaaaggtgaagag

SEQ ID NO: 12308 - RNA, 20 nt, synthetic construct
  source 1..20: mol_type = other RNA
gggactccagagggagccac

SEQ ID NO: 12309 - RNA, 20 nt, synthetic construct
  source 1..20: mol_type = other RNA
gggactccagagtccaggcc

SEQ ID NO: 12310 - RNA, 20 nt, synthetic construct
  source 1..20: mol_type = other RNA
gggactcccagaggggtgag

SEQ ID NO: 12311 - RNA, 20 nt, synthetic construct
  source 1..20: mol_type = other RNA
gggactctttaaggaaagaa

SEQ ID NO: 12312 - RNA, 20 nt, synthetic construct
  source 1..20: mol_type = other RNA
gggactgggggcctggactc

SEQ ID NO: 12313 - RNA, 20 nt, synthetic construct
  source 1..20: mol_type = other RNA
gggacttgccccaggccttg

SEQ ID NO: 12314 - RNA, 20 nt, synthetic construct
  source 1..20: mol_type = other RNA
gggacttggggggtaattta

SEQ ID NO: 12315 - RNA, 20 nt, synthetic construct
  source 1..20: mol_type = other RNA
gggagaggctgggggcctgg

SEQ ID NO: 12316 - RNA, 20 nt, synthetic construct
  source 1..20: mol_type = other RNA
gggagagggtagcgcagggt

SEQ ID NO: 12317 - RNA, 20 nt, synthetic construct
  source 1..20: mol_type = other RNA
gggagccacgaaaacagatc

SEQ ID NO: 12318 - RNA, 20 nt, synthetic construct
  source 1..20: mol_type = other RNA
gggagctacgagggccaaga

SEQ ID NO: 12319 - RNA, 20 nt, synthetic construct
  source 1..20: mol_type = other RNA
gggagctgggtttgggtcag

SEQ ID NO: 12320 - RNA, 20 nt, synthetic construct
  source 1..20: mol_type = other RNA
gggaggaggggctggggcct

SEQ ID NO: 12321 - RNA, 20 nt, synthetic construct
  source 1..20: mol_type = other RNA
gggagggagctacgagggcc

SEQ ID NO: 12322 - RNA, 20 nt, synthetic construct
  source 1..20: mol_type = other RNA
gggagggggcttctcatctg

SEQ ID NO: 12323 - RNA, 20 nt, synthetic construct
  source 1..20: mol_type = other RNA
gggaggggggcaaggagagc

SEQ ID NO: 12324 - RNA, 20 nt, synthetic construct
  source 1..20: mol_type = other RNA
gggaggggttgggcctggac

SEQ ID NO: 12325 - RNA, 20 nt, synthetic construct
  source 1..20: mol_type = other RNA
gggagtagaggcggccacga

SEQ ID NO: 12326 - RNA, 20 nt, synthetic construct
  source 1..20: mol_type = other RNA
gggagtcccgcccaggcccc

SEQ ID NO: 12327 - RNA, 20 nt, synthetic construct
  source 1..20: mol_type = other RNA
gggagttttccacacggaca

SEQ ID NO: 12328 - RNA, 20 nt, synthetic construct
  source 1..20: mol_type = other RNA
gggataaattaccccccaag

SEQ ID NO: 12329 - RNA, 20 nt, synthetic construct
  source 1..20: mol_type = other RNA
gggataccccgaagagtgag

SEQ ID NO: 12330 - RNA, 20 nt, synthetic construct
  source 1..20: mol_type = other RNA
gggatgaactcggctcgttt

SEQ ID NO: 12331 - RNA, 20 nt, synthetic construct
  source 1..20: mol_type = other RNA
gggatgcaggggaacgggga

SEQ ID NO: 12332 - RNA, 20 nt, synthetic construct
  source 1..20: mol_type = other RNA
gggatgcaggggaacggggc

SEQ ID NO: 12333 - RNA, 20 nt, synthetic construct
  source 1..20: mol_type = other RNA
gggatgcaggggaaggggga

SEQ ID NO: 12334 - RNA, 20 nt, synthetic construct
  source 1..20: mol_type = other RNA
gggatgcctgtactgggcag

SEQ ID NO: 12335 - RNA, 20 nt, synthetic construct
  source 1..20: mol_type = other RNA
gggatgcgtgacctgcccgg

SEQ ID NO: 12336 - RNA, 20 nt, synthetic construct
  source 1..20: mol_type = other RNA
gggatggttggtcactgtct

SEQ ID NO: 12337 - RNA, 20 nt, synthetic construct
  source 1..20: mol_type = other RNA
gggattcccttctcaggtta

SEQ ID NO: 12338 - RNA, 20 nt, synthetic construct
  source 1..20: mol_type = other RNA
gggcaaacagcataagctgg

SEQ ID NO: 12339 - RNA, 20 nt, synthetic construct
  source 1..20: mol_type = other RNA
gggcaaccaggcgtatctta

SEQ ID NO: 12340 - RNA, 20 nt, synthetic construct
  source 1..20: mol_type = other RNA
gggcaaggagagcaatgggc

SEQ ID NO: 12341 - RNA, 20 nt, synthetic construct
  source 1..20: mol_type = other RNA
gggcaagtccctcctccgac

SEQ ID NO: 12342 - RNA, 20 nt, synthetic construct
  source 1..20: mol_type = other RNA
gggcaccagggactccagag

SEQ ID NO: 12343 - RNA, 20 nt, synthetic construct
  source 1..20: mol_type = other RNA
gggcacgtgcggccccttca

SEQ ID NO: 12344 - RNA, 20 nt, synthetic construct
  source 1..20: mol_type = other RNA
gggcagctttggagaggtga

SEQ ID NO: 12345 - RNA, 20 nt, synthetic construct
  source 1..20: mol_type = other RNA
gggcaggagagccaggggca

SEQ ID NO: 12346 - RNA, 20 nt, synthetic construct
  source 1..20: mol_type = other RNA
gggcagggtaccagcctcac

SEQ ID NO: 12347 - RNA, 20 nt, synthetic construct
  source 1..20: mol_type = other RNA
gggcaggtccttgaaaggga

SEQ ID NO: 12348 - RNA, 20 nt, synthetic construct
  source 1..20: mol_type = other RNA
gggcatgagatggtggacga

SEQ ID NO: 12349 - RNA, 20 nt, synthetic construct
  source 1..20: mol_type = other RNA
gggccaagagcatgaggtca

SEQ ID NO: 12350 - RNA, 20 nt, synthetic construct
  source 1..20: mol_type = other RNA
gggccaccgtttctcattct

SEQ ID NO: 12351 - RNA, 20 nt, synthetic construct
  source 1..20: mol_type = other RNA
gggccaggactcctggctct

SEQ ID NO: 12352 - RNA, 20 nt, synthetic construct
  source 1..20: mol_type = other RNA
gggcccacggcttcgttcct

SEQ ID NO: 12353 - RNA, 20 nt, synthetic construct
  source 1..20: mol_type = other RNA
gggcccaggcacacaggtgt

SEQ ID NO: 12354 - RNA, 20 nt, synthetic construct
  source 1..20: mol_type = other RNA
gggcccagggctatgcaggg

SEQ ID NO: 12355 - RNA, 20 nt, synthetic construct
  source 1..20: mol_type = other RNA
gggccccaggctgtcacact

SEQ ID NO: 12356 - RNA, 20 nt, synthetic construct
  source 1..20: mol_type = other RNA
gggccccgtgcagagggggc

SEQ ID NO: 12357 - RNA, 20 nt, synthetic construct
  source 1..20: mol_type = other RNA
gggccctgcagccaggggct

SEQ ID NO: 12358 - RNA, 20 nt, synthetic construct
  source 1..20: mol_type = other RNA
gggccgcacgtgccctggga

SEQ ID NO: 12359 - RNA, 20 nt, synthetic construct
  source 1..20: mol_type = other RNA
gggcctcagtgaactggagt

SEQ ID NO: 12360 - RNA, 20 nt, synthetic construct
  source 1..20: mol_type = other RNA
gggcctctgggggatgcagg

SEQ ID NO: 12361 - RNA, 20 nt, synthetic construct
  source 1..20: mol_type = other RNA
gggcctggacccctgggtct

SEQ ID NO: 12362 - RNA, 20 nt, synthetic construct
  source 1..20: mol_type = other RNA
gggcctggactccttcatct

SEQ ID NO: 12363 - RNA, 20 nt, synthetic construct
  source 1..20: mol_type = other RNA
gggcctggactctggagtcc

SEQ ID NO: 12364 - RNA, 20 nt, synthetic construct
  source 1..20: mol_type = other RNA
gggcctggacttctgggtct

SEQ ID NO: 12365 - RNA, 20 nt, synthetic construct
  source 1..20: mol_type = other RNA
gggcctggcctcctgggttg

SEQ ID NO: 12366 - RNA, 20 nt, synthetic construct
  source 1..20: mol_type = other RNA
gggcctgggcgggactccca

SEQ ID NO: 12367 - RNA, 20 nt, synthetic construct
  source 1..20: mol_type = other RNA
gggcctgggctcctgggttt

SEQ ID NO: 12368 - RNA, 20 nt, synthetic construct
  source 1..20: mol_type = other RNA
gggccttagggaagcgggac

SEQ ID NO: 12369 - RNA, 20 nt, synthetic construct
  source 1..20: mol_type = other RNA
gggcctttccctttcaagga

SEQ ID NO: 12370 - RNA, 20 nt, synthetic construct
  source 1..20: mol_type = other RNA
gggcgatgcttggggacctg

SEQ ID NO: 12371 - RNA, 20 nt, synthetic construct
  source 1..20: mol_type = other RNA
gggcggaagggctggggcct

SEQ ID NO: 12372 - RNA, 20 nt, synthetic construct
  source 1..20: mol_type = other RNA
gggcggaggaatatgtccca

SEQ ID NO: 12373 - RNA, 20 nt, synthetic construct
  source 1..20: mol_type = other RNA
gggcgggactcccagagggg

SEQ ID NO: 12374 - RNA, 20 nt, synthetic construct
  source 1..20: mol_type = other RNA
gggctagagtaggaggggct

SEQ ID NO: 12375 - RNA, 20 nt, synthetic construct
  source 1..20: mol_type = other RNA
gggctatgcagggtggagga

SEQ ID NO: 12376 - RNA, 20 nt, synthetic construct
  source 1..20: mol_type = other RNA
gggctcagtctgaagagcag

SEQ ID NO: 12377 - RNA, 20 nt, synthetic construct
  source 1..20: mol_type = other RNA
gggctccgggacctgaactg

SEQ ID NO: 12378 - RNA, 20 nt, synthetic construct
  source 1..20: mol_type = other RNA
gggctcctgggtttgagaga

SEQ ID NO: 12379 - RNA, 20 nt, synthetic construct
  source 1..20: mol_type = other RNA
gggctgaacagagaagagct

SEQ ID NO: 12380 - RNA, 20 nt, synthetic construct
  source 1..20: mol_type = other RNA
gggctgacacgggccaccgt

SEQ ID NO: 12381 - RNA, 20 nt, synthetic construct
  source 1..20: mol_type = other RNA
gggctggaacctcttcccta

SEQ ID NO: 12382 - RNA, 20 nt, synthetic construct
  source 1..20: mol_type = other RNA
gggctggagccaggattctt

SEQ ID NO: 12383 - RNA, 20 nt, synthetic construct
  source 1..20: mol_type = other RNA
gggctggctactggccttat

SEQ ID NO: 12384 - RNA, 20 nt, synthetic construct
  source 1..20: mol_type = other RNA
gggctgggcctggacccctg

SEQ ID NO: 12385 - RNA, 20 nt, synthetic construct
  source 1..20: mol_type = other RNA
gggctggggcctggactcct

SEQ ID NO: 12386 - RNA, 20 nt, synthetic construct
  source 1..20: mol_type = other RNA
gggctggggcctggactcgt

SEQ ID NO: 12387 - RNA, 20 nt, synthetic construct
  source 1..20: mol_type = other RNA
gggctggggcctggcctcct

SEQ ID NO: 12388 - RNA, 20 nt, synthetic construct
  source 1..20: mol_type = other RNA
gggctgggggccaggactcc

SEQ ID NO: 12389 - RNA, 20 nt, synthetic construct
  source 1..20: mol_type = other RNA
gggctgggggcctggacttc

SEQ ID NO: 12390 - RNA, 20 nt, synthetic construct
  source 1..20: mol_type = other RNA
gggctggggtggcctctcgt

SEQ ID NO: 12391 - RNA, 20 nt, synthetic construct
  source 1..20: mol_type = other RNA
gggctggggttcagagagga

SEQ ID NO: 12392 - RNA, 20 nt, synthetic construct
  source 1..20: mol_type = other RNA
gggctgtgaaggggccgcac

SEQ ID NO: 12393 - RNA, 20 nt, synthetic construct
  source 1..20: mol_type = other RNA
gggctgtggtgaggaggggg

SEQ ID NO: 12394 - RNA, 20 nt, synthetic construct
  source 1..20: mol_type = other RNA
gggctgtgtttctcgtcctg

SEQ ID NO: 12395 - RNA, 20 nt, synthetic construct
  source 1..20: mol_type = other RNA
gggcttctcatctgggtgcg

SEQ ID NO: 12396 - RNA, 20 nt, synthetic construct
  source 1..20: mol_type = other RNA
gggcttctgggtttgagtcc

SEQ ID NO: 12397 - RNA, 20 nt, synthetic construct
  source 1..20: mol_type = other RNA
gggcttgccaaggactcaaa

SEQ ID NO: 12398 - RNA, 20 nt, synthetic construct
  source 1..20: mol_type = other RNA
ggggaaaatgacccaacagc

SEQ ID NO: 12399 - RNA, 20 nt, synthetic construct
  source 1..20: mol_type = other RNA
ggggaacggggatgcagggg

SEQ ID NO: 12400 - RNA, 20 nt, synthetic construct
  source 1..20: mol_type = other RNA
ggggaacggggctcagtctg

SEQ ID NO: 12401 - RNA, 20 nt, synthetic construct
  source 1..20: mol_type = other RNA
ggggaagggagggggcttct

SEQ ID NO: 12402 - RNA, 20 nt, synthetic construct
  source 1..20: mol_type = other RNA
ggggaagggggatgcagggg

SEQ ID NO: 12403 - RNA, 20 nt, synthetic construct
  source 1..20: mol_type = other RNA
ggggacaaaagccgaagtcc

SEQ ID NO: 12404 - RNA, 20 nt, synthetic construct
  source 1..20: mol_type = other RNA
ggggacagggaagcctgagc

SEQ ID NO: 12405 - RNA, 20 nt, synthetic construct
  source 1..20: mol_type = other RNA
ggggacctgcctggagaagg

SEQ ID NO: 12406 - RNA, 20 nt, synthetic construct
  source 1..20: mol_type = other RNA
ggggactagaaaggtgaaga

SEQ ID NO: 12407 - RNA, 20 nt, synthetic construct
  source 1..20: mol_type = other RNA
ggggactctttaaggaaaga

SEQ ID NO: 12408 - RNA, 20 nt, synthetic construct
  source 1..20: mol_type = other RNA
ggggagaggctgggggcctg

SEQ ID NO: 12409 - RNA, 20 nt, synthetic construct
  source 1..20: mol_type = other RNA
ggggagctgggtttgggtca

SEQ ID NO: 12410 - RNA, 20 nt, synthetic construct
  source 1..20: mol_type = other RNA
ggggaggggggcaaggagag

SEQ ID NO: 12411 - RNA, 20 nt, synthetic construct
  source 1..20: mol_type = other RNA
ggggaggggttgggcctgga

SEQ ID NO: 12412 - RNA, 20 nt, synthetic construct
  source 1..20: mol_type = other RNA
ggggatgcaggggaacgggg

SEQ ID NO: 12413 - RNA, 20 nt, synthetic construct
  source 1..20: mol_type = other RNA
ggggatgcaggggaaggggg

SEQ ID NO: 12414 - RNA, 20 nt, synthetic construct
  source 1..20: mol_type = other RNA
ggggatgcgtgacctgcccg

SEQ ID NO: 12415 - RNA, 20 nt, synthetic construct
  source 1..20: mol_type = other RNA
ggggcaaggagagcaatggg

SEQ ID NO: 12416 - RNA, 20 nt, synthetic construct
  source 1..20: mol_type = other RNA
ggggcaagtccctcctccga

SEQ ID NO: 12417 - RNA, 20 nt, synthetic construct
  source 1..20: mol_type = other RNA
ggggcaggagagccaggggc

SEQ ID NO: 12418 - RNA, 20 nt, synthetic construct
  source 1..20: mol_type = other RNA
ggggcagggtaccagcctca

SEQ ID NO: 12419 - RNA, 20 nt, synthetic construct
  source 1..20: mol_type = other RNA
ggggcatgagatggtggacg

SEQ ID NO: 12420 - RNA, 20 nt, synthetic construct
  source 1..20: mol_type = other RNA
ggggccaggactcctggctc

SEQ ID NO: 12421 - RNA, 20 nt, synthetic construct
  source 1..20: mol_type = other RNA
ggggcccaggcacacaggtg

SEQ ID NO: 12422 - RNA, 20 nt, synthetic construct
  source 1..20: mol_type = other RNA
ggggccctgcagccaggggc

SEQ ID NO: 12423 - RNA, 20 nt, synthetic construct
  source 1..20: mol_type = other RNA
ggggccgcacgtgccctggg

SEQ ID NO: 12424 - RNA, 20 nt, synthetic construct
  source 1..20: mol_type = other RNA
ggggcctcagtgaactggag

SEQ ID NO: 12425 - RNA, 20 nt, synthetic construct
  source 1..20: mol_type = other RNA
ggggcctctgggggatgcag

SEQ ID NO: 12426 - RNA, 20 nt, synthetic construct
  source 1..20: mol_type = other RNA
ggggcctggactccttcatc

SEQ ID NO: 12427 - RNA, 20 nt, synthetic construct
  source 1..20: mol_type = other RNA
ggggcctggacttctgggtc

SEQ ID NO: 12428 - RNA, 20 nt, synthetic construct
  source 1..20: mol_type = other RNA
ggggcctggcctcctgggtt

SEQ ID NO: 12429 - RNA, 20 nt, synthetic construct
  source 1..20: mol_type = other RNA
ggggcctgggcgggactccc

SEQ ID NO: 12430 - RNA, 20 nt, synthetic construct
  source 1..20: mol_type = other RNA
ggggcctgggctcctgggtt

SEQ ID NO: 12431 - RNA, 20 nt, synthetic construct
  source 1..20: mol_type = other RNA
ggggcgatgcttggggacct

SEQ ID NO: 12432 - RNA, 20 nt, synthetic construct
  source 1..20: mol_type = other RNA
ggggctagagtaggaggggc

SEQ ID NO: 12433 - RNA, 20 nt, synthetic construct
  source 1..20: mol_type = other RNA
ggggctcagtctgaagagca

SEQ ID NO: 12434 - RNA, 20 nt, synthetic construct
  source 1..20: mol_type = other RNA
ggggctgacacgggccaccg

SEQ ID NO: 12435 - RNA, 20 nt, synthetic construct
  source 1..20: mol_type = other RNA
ggggctggaacctcttccct

SEQ ID NO: 12436 - RNA, 20 nt, synthetic construct
  source 1..20: mol_type = other RNA
ggggctggagccaggattct

SEQ ID NO: 12437 - RNA, 20 nt, synthetic construct
  source 1..20: mol_type = other RNA
ggggctggctactggcctta

SEQ ID NO: 12438 - RNA, 20 nt, synthetic construct
  source 1..20: mol_type = other RNA
ggggctggggcctggactcg

SEQ ID NO: 12439 - RNA, 20 nt, synthetic construct
  source 1..20: mol_type = other RNA
ggggctgggggccaggactc

SEQ ID NO: 12440 - RNA, 20 nt, synthetic construct
  source 1..20: mol_type = other RNA
ggggctgtgtttctcgtcct

SEQ ID NO: 12441 - RNA, 20 nt, synthetic construct
  source 1..20: mol_type = other RNA
ggggcttctcatctgggtgc

SEQ ID NO: 12442 - RNA, 20 nt, synthetic construct
  source 1..20: mol_type = other RNA
gggggacaaaagccgaagtc

SEQ ID NO: 12443 - RNA, 20 nt, synthetic construct
  source 1..20: mol_type = other RNA
gggggacagggaagcctgag

SEQ ID NO: 12444 - RNA, 20 nt, synthetic construct
  source 1..20: mol_type = other RNA
gggggatgcaggggaacggg

SEQ ID NO: 12445 - RNA, 20 nt, synthetic construct
  source 1..20: mol_type = other RNA
gggggatgcaggggaagggg

SEQ ID NO: 12446 - RNA, 20 nt, synthetic construct
  source 1..20: mol_type = other RNA
gggggatgcgtgacctgccc

SEQ ID NO: 12447 - RNA, 20 nt, synthetic construct
  source 1..20: mol_type = other RNA
gggggcaaggagagcaatgg

SEQ ID NO: 12448 - RNA, 20 nt, synthetic construct
  source 1..20: mol_type = other RNA
gggggcagggtaccagcctc

SEQ ID NO: 12449 - RNA, 20 nt, synthetic construct
  source 1..20: mol_type = other RNA
gggggccaggactcctggct

SEQ ID NO: 12450 - RNA, 20 nt, synthetic construct
  source 1..20: mol_type = other RNA
gggggcctcagtgaactgga

SEQ ID NO: 12451 - RNA, 20 nt, synthetic construct
  source 1..20: mol_type = other RNA
gggggcctggactccttcat

SEQ ID NO: 12452 - RNA, 20 nt, synthetic construct
  source 1..20: mol_type = other RNA
gggggcctggacttctgggt

SEQ ID NO: 12453 - RNA, 20 nt, synthetic construct
  source 1..20: mol_type = other RNA
gggggcctgggctcctgggt

SEQ ID NO: 12454 - RNA, 20 nt, synthetic construct
  source 1..20: mol_type = other RNA
gggggcgatgcttggggacc

SEQ ID NO: 12455 - RNA, 20 nt, synthetic construct
  source 1..20: mol_type = other RNA
gggggctagagtaggagggg

SEQ ID NO: 12456 - RNA, 20 nt, synthetic construct
  source 1..20: mol_type = other RNA
gggggcttctcatctgggtg

SEQ ID NO: 12457 - RNA, 20 nt, synthetic construct
  source 1..20: mol_type = other RNA
ggggggacaaaagccgaagt

SEQ ID NO: 12458 - RNA, 20 nt, synthetic construct
  source 1..20: mol_type = other RNA
ggggggatgcgtgacctgcc

SEQ ID NO: 12459 - RNA, 20 nt, synthetic construct
  source 1..20: mol_type = other RNA
ggggggcaaggagagcaatg

SEQ ID NO: 12460 - RNA, 20 nt, synthetic construct
  source 1..20: mol_type = other RNA
ggggggcgatgcttggggac

SEQ ID NO: 12461 - RNA, 20 nt, synthetic construct
  source 1..20: mol_type = other RNA
ggggggtaatttatcccgtg

SEQ ID NO: 12462 - RNA, 20 nt, synthetic construct
  source 1..20: mol_type = other RNA
ggggggtgtccgtgtggaaa

SEQ ID NO: 12463 - RNA, 20 nt, synthetic construct
  source 1..20: mol_type = other RNA
gggggtaatttatcccgtgg

SEQ ID NO: 12464 - RNA, 20 nt, synthetic construct
  source 1..20: mol_type = other RNA
gggggtcggaggagggactt

SEQ ID NO: 12465 - RNA, 20 nt, synthetic construct
  source 1..20: mol_type = other RNA
gggggtgtccgtgtggaaaa

SEQ ID NO: 12466 - RNA, 20 nt, synthetic construct
  source 1..20: mol_type = other RNA
gggggttgggggctagagta

SEQ ID NO: 12467 - RNA, 20 nt, synthetic construct
  source 1..20: mol_type = other RNA
gggggttttgccgtgtctaa

SEQ ID NO: 12468 - RNA, 20 nt, synthetic construct
  source 1..20: mol_type = other RNA
ggggtaatttatcccgtgga

SEQ ID NO: 12469 - RNA, 20 nt, synthetic construct
  source 1..20: mol_type = other RNA
ggggtaccctaagaacttgg

SEQ ID NO: 12470 - RNA, 20 nt, synthetic construct
  source 1..20: mol_type = other RNA
ggggtatcccaggaggcctg

SEQ ID NO: 12471 - RNA, 20 nt, synthetic construct
  source 1..20: mol_type = other RNA
ggggtccaaaacttgggggg

SEQ ID NO: 12472 - RNA, 20 nt, synthetic construct
  source 1..20: mol_type = other RNA
ggggtccaggccaagtaggt

SEQ ID NO: 12473 - RNA, 20 nt, synthetic construct
  source 1..20: mol_type = other RNA
ggggtccaggcccagccccg

SEQ ID NO: 12474 - RNA, 20 nt, synthetic construct
  source 1..20: mol_type = other RNA
ggggtcggaggagggacttg

SEQ ID NO: 12475 - RNA, 20 nt, synthetic construct
  source 1..20: mol_type = other RNA
ggggtgaccagcttatgctg

SEQ ID NO: 12476 - RNA, 20 nt, synthetic construct
  source 1..20: mol_type = other RNA
ggggtgactgcttggcaaac

SEQ ID NO: 12477 - RNA, 20 nt, synthetic construct
  source 1..20: mol_type = other RNA
ggggtgagacagctgcacac

SEQ ID NO: 12478 - RNA, 20 nt, synthetic construct
  source 1..20: mol_type = other RNA
ggggtgcaggaatgggggca

SEQ ID NO: 12479 - RNA, 20 nt, synthetic construct
  source 1..20: mol_type = other RNA
ggggtggcctctcgtggggt

SEQ ID NO: 12480 - RNA, 20 nt, synthetic construct
  source 1..20: mol_type = other RNA
ggggtgggctggggttcaga

SEQ ID NO: 12481 - RNA, 20 nt, synthetic construct
  source 1..20: mol_type = other RNA
ggggtggtttccgagcttga

SEQ ID NO: 12482 - RNA, 20 nt, synthetic construct
  source 1..20: mol_type = other RNA
ggggtgtccgtgtggaaaac

SEQ ID NO: 12483 - RNA, 20 nt, synthetic construct
  source 1..20: mol_type = other RNA
ggggttcagagaggagggat

SEQ ID NO: 12484 - RNA, 20 nt, synthetic construct
  source 1..20: mol_type = other RNA
ggggttcccgcacccagatg

SEQ ID NO: 12485 - RNA, 20 nt, synthetic construct
  source 1..20: mol_type = other RNA
ggggttcctggctctgctct

SEQ ID NO: 12486 - RNA, 20 nt, synthetic construct
  source 1..20: mol_type = other RNA
ggggttgggcctggactctg

SEQ ID NO: 12487 - RNA, 20 nt, synthetic construct
  source 1..20: mol_type = other RNA
ggggttgggggctagagtag

SEQ ID NO: 12488 - RNA, 20 nt, synthetic construct
  source 1..20: mol_type = other RNA
ggggttttgccgtgtctaac

SEQ ID NO: 12489 - RNA, 20 nt, synthetic construct
  source 1..20: mol_type = other RNA
gggtaatttatcccgtggat

SEQ ID NO: 12490 - RNA, 20 nt, synthetic construct
  source 1..20: mol_type = other RNA
gggtaccagcctcaccaagt

SEQ ID NO: 12491 - RNA, 20 nt, synthetic construct
  source 1..20: mol_type = other RNA
gggtaccccacgtgggttta

SEQ ID NO: 12492 - RNA, 20 nt, synthetic construct
  source 1..20: mol_type = other RNA
gggtaccctaagaacttggg

SEQ ID NO: 12493 - RNA, 20 nt, synthetic construct
  source 1..20: mol_type = other RNA
gggtagcgcagggtggccac

SEQ ID NO: 12494 - RNA, 20 nt, synthetic construct
  source 1..20: mol_type = other RNA
gggtatcccaggaggcctgg

SEQ ID NO: 12495 - RNA, 20 nt, synthetic construct
  source 1..20: mol_type = other RNA
gggtcaagctcggaaaccac

SEQ ID NO: 12496 - RNA, 20 nt, synthetic construct
  source 1..20: mol_type = other RNA
gggtcaggtctgggtgtggg

SEQ ID NO: 12497 - RNA, 20 nt, synthetic construct
  source 1..20: mol_type = other RNA
gggtcattttccccactgtc

SEQ ID NO: 12498 - RNA, 20 nt, synthetic construct
  source 1..20: mol_type = other RNA
gggtccaaaacttgggggga

SEQ ID NO: 12499 - RNA, 20 nt, synthetic construct
  source 1..20: mol_type = other RNA
gggtccaggccaagtaggtg

SEQ ID NO: 12500 - RNA, 20 nt, synthetic construct
  source 1..20: mol_type = other RNA
gggtccaggcccagccccgc

SEQ ID NO: 12501 - RNA, 20 nt, synthetic construct
  source 1..20: mol_type = other RNA
gggtcccgcttccctaaggc

SEQ ID NO: 12502 - RNA, 20 nt, synthetic construct
  source 1..20: mol_type = other RNA
gggtcggaggagggacttgc

SEQ ID NO: 12503 - RNA, 20 nt, synthetic construct
  source 1..20: mol_type = other RNA
gggtctgaatggggagaggc

SEQ ID NO: 12504 - RNA, 20 nt, synthetic construct
  source 1..20: mol_type = other RNA
gggtctgagggtggagggac

SEQ ID NO: 12505 - RNA, 20 nt, synthetic construct
  source 1..20: mol_type = other RNA
gggtcttagggaggcggggc

SEQ ID NO: 12506 - RNA, 20 nt, synthetic construct
  source 1..20: mol_type = other RNA
gggtgaccagcttatgctgt

SEQ ID NO: 12507 - RNA, 20 nt, synthetic construct
  source 1..20: mol_type = other RNA
gggtgactcttgattcccgg

SEQ ID NO: 12508 - RNA, 20 nt, synthetic construct
  source 1..20: mol_type = other RNA
gggtgactgcttggcaaact

SEQ ID NO: 12509 - RNA, 20 nt, synthetic construct
  source 1..20: mol_type = other RNA
gggtgagacagctgcacacc

SEQ ID NO: 12510 - RNA, 20 nt, synthetic construct
  source 1..20: mol_type = other RNA
gggtgcaggaatgggggcag

SEQ ID NO: 12511 - RNA, 20 nt, synthetic construct
  source 1..20: mol_type = other RNA
gggtgcgggaaccccacatg

SEQ ID NO: 12512 - RNA, 20 nt, synthetic construct
  source 1..20: mol_type = other RNA
gggtggaaataaacgagccg

SEQ ID NO: 12513 - RNA, 20 nt, synthetic construct
  source 1..20: mol_type = other RNA
gggtggaggaaggccaccct

SEQ ID NO: 12514 - RNA, 20 nt, synthetic construct
  source 1..20: mol_type = other RNA
gggtggagggactgggggcc

SEQ ID NO: 12515 - RNA, 20 nt, synthetic construct
  source 1..20: mol_type = other RNA
gggtggattctcctccaact

SEQ ID NO: 12516 - RNA, 20 nt, synthetic construct
  source 1..20: mol_type = other RNA
gggtggccactgagaaccgg

SEQ ID NO: 12517 - RNA, 20 nt, synthetic construct
  source 1..20: mol_type = other RNA
gggtggcctctcgtggggtc

SEQ ID NO: 12518 - RNA, 20 nt, synthetic construct
  source 1..20: mol_type = other RNA
gggtggccttcctccaccct

SEQ ID NO: 12519 - RNA, 20 nt, synthetic construct
  source 1..20: mol_type = other RNA
gggtgggctccgggacctga

SEQ ID NO: 12520 - RNA, 20 nt, synthetic construct
  source 1..20: mol_type = other RNA
gggtgggctggggttcagag

SEQ ID NO: 12521 - RNA, 20 nt, synthetic construct
  source 1..20: mol_type = other RNA
gggtggtgacgggggttttg

SEQ ID NO: 12522 - RNA, 20 nt, synthetic construct
  source 1..20: mol_type = other RNA
gggtggtttccgagcttgac

SEQ ID NO: 12523 - RNA, 20 nt, synthetic construct
  source 1..20: mol_type = other RNA
gggtgtccgtgtggaaaact

SEQ ID NO: 12524 - RNA, 20 nt, synthetic construct
  source 1..20: mol_type = other RNA
gggtgtggggtgaccagctt

SEQ ID NO: 12525 - RNA, 20 nt, synthetic construct
  source 1..20: mol_type = other RNA
gggttcagagaggagggatt

SEQ ID NO: 12526 - RNA, 20 nt, synthetic construct
  source 1..20: mol_type = other RNA
gggttcccgcacccagatga

SEQ ID NO: 12527 - RNA, 20 nt, synthetic construct
  source 1..20: mol_type = other RNA
gggttcctggctctgctctt

SEQ ID NO: 12528 - RNA, 20 nt, synthetic construct
  source 1..20: mol_type = other RNA
gggttgaatggggaggggtt

SEQ ID NO: 12529 - RNA, 20 nt, synthetic construct
  source 1..20: mol_type = other RNA
gggttgggcctggactctgg

SEQ ID NO: 12530 - RNA, 20 nt, synthetic construct
  source 1..20: mol_type = other RNA
gggttgggggctagagtagg

SEQ ID NO: 12531 - RNA, 20 nt, synthetic construct
  source 1..20: mol_type = other RNA
gggtttaaggcaggaggggc

SEQ ID NO: 12532 - RNA, 20 nt, synthetic construct
  source 1..20: mol_type = other RNA
gggtttatcaaccacttggt

SEQ ID NO: 12533 - RNA, 20 nt, synthetic construct
  source 1..20: mol_type = other RNA
gggtttcagtgctaaaacta

SEQ ID NO: 12534 - RNA, 20 nt, synthetic construct
  source 1..20: mol_type = other RNA
gggtttgagagaggaggggc

SEQ ID NO: 12535 - RNA, 20 nt, synthetic construct
  source 1..20: mol_type = other RNA
gggtttgagtccttggcaag

SEQ ID NO: 12536 - RNA, 20 nt, synthetic construct
  source 1..20: mol_type = other RNA
gggtttgggtcaggtctggg

SEQ ID NO: 12537 - RNA, 20 nt, synthetic construct
  source 1..20: mol_type = other RNA
gggttttgccgtgtctaaca

SEQ ID NO: 12538 - RNA, 20 nt, synthetic construct
  source 1..20: mol_type = other RNA
ggtaaaactgacgcacggag

SEQ ID NO: 12539 - RNA, 20 nt, synthetic construct
  source 1..20: mol_type = other RNA
ggtaatttatcccgtggatc

SEQ ID NO: 12540 - RNA, 20 nt, synthetic construct
  source 1..20: mol_type = other RNA
ggtaccagcctcaccaagtg

SEQ ID NO: 12541 - RNA, 20 nt, synthetic construct
  source 1..20: mol_type = other RNA
ggtaccatgtggggttcccg

SEQ ID NO: 12542 - RNA, 20 nt, synthetic construct
  source 1..20: mol_type = other RNA
ggtaccccacgtgggtttat

SEQ ID NO: 12543 - RNA, 20 nt, synthetic construct
  source 1..20: mol_type = other RNA
ggtaccctaagaacttggga

SEQ ID NO: 12544 - RNA, 20 nt, synthetic construct
  source 1..20: mol_type = other RNA
ggtaccctgcccccattcct

SEQ ID NO: 12545 - RNA, 20 nt, synthetic construct
  source 1..20: mol_type = other RNA
ggtacctgttagacacggca

SEQ ID NO: 12546 - RNA, 20 nt, synthetic construct
  source 1..20: mol_type = other RNA
ggtagacagggctggggtgg

SEQ ID NO: 12547 - RNA, 20 nt, synthetic construct
  source 1..20: mol_type = other RNA
ggtagcgcagggtggccact

SEQ ID NO: 12548 - RNA, 20 nt, synthetic construct
  source 1..20: mol_type = other RNA
ggtatcccaggaggcctgga

SEQ ID NO: 12549 - RNA, 20 nt, synthetic construct
  source 1..20: mol_type = other RNA
ggtcaagctcggaaaccacc

SEQ ID NO: 12550 - RNA, 20 nt, synthetic construct
  source 1..20: mol_type = other RNA
ggtcaccccacacccagacc

SEQ ID NO: 12551 - RNA, 20 nt, synthetic construct
  source 1..20: mol_type = other RNA
ggtcactgtctctgggtgac

SEQ ID NO: 12552 - RNA, 20 nt, synthetic construct
  source 1..20: mol_type = other RNA
ggtcaggccggccaggcctt

SEQ ID NO: 12553 - RNA, 20 nt, synthetic construct
  source 1..20: mol_type = other RNA
ggtcaggtctgggtgtgggg

SEQ ID NO: 12554 - RNA, 20 nt, synthetic construct
  source 1..20: mol_type = other RNA
ggtcatggaaactcgggctg

SEQ ID NO: 12555 - RNA, 20 nt, synthetic construct
  source 1..20: mol_type = other RNA
ggtcattttccccactgtcc

SEQ ID NO: 12556 - RNA, 20 nt, synthetic construct
  source 1..20: mol_type = other RNA
ggtccaaaacttggggggac

SEQ ID NO: 12557 - RNA, 20 nt, synthetic construct
  source 1..20: mol_type = other RNA
ggtccaggccaagtaggtgg

SEQ ID NO: 12558 - RNA, 20 nt, synthetic construct
  source 1..20: mol_type = other RNA
ggtccaggcccagccccgcc

SEQ ID NO: 12559 - RNA, 20 nt, synthetic construct
  source 1..20: mol_type = other RNA
ggtccccaagcatcgccccc

SEQ ID NO: 12560 - RNA, 20 nt, synthetic construct
  source 1..20: mol_type = other RNA
ggtcccgcttccctaaggcc

SEQ ID NO: 12561 - RNA, 20 nt, synthetic construct
  source 1..20: mol_type = other RNA
ggtcccggagcccacccagt

SEQ ID NO: 12562 - RNA, 20 nt, synthetic construct
  source 1..20: mol_type = other RNA
ggtcctgagttctaactttg

SEQ ID NO: 12563 - RNA, 20 nt, synthetic construct
  source 1..20: mol_type = other RNA
ggtccttccaagggtcaagc

SEQ ID NO: 12564 - RNA, 20 nt, synthetic construct
  source 1..20: mol_type = other RNA
ggtccttgaaagggaaaggc

SEQ ID NO: 12565 - RNA, 20 nt, synthetic construct
  source 1..20: mol_type = other RNA
ggtcggaggagggacttgcc

SEQ ID NO: 12566 - RNA, 20 nt, synthetic construct
  source 1..20: mol_type = other RNA
ggtcgtggccgcctctactc

SEQ ID NO: 12567 - RNA, 20 nt, synthetic construct
  source 1..20: mol_type = other RNA
ggtctgaatggggagaggct

SEQ ID NO: 12568 - RNA, 20 nt, synthetic construct
  source 1..20: mol_type = other RNA
ggtctgagggtggagggact

SEQ ID NO: 12569 - RNA, 20 nt, synthetic construct
  source 1..20: mol_type = other RNA
ggtctgggtgtggggtgacc

SEQ ID NO: 12570 - RNA, 20 nt, synthetic construct
  source 1..20: mol_type = other RNA
ggtcttagggaggcggggct

SEQ ID NO: 12571 - RNA, 20 nt, synthetic construct
  source 1..20: mol_type = other RNA
ggtgaacacctaggacgcac

SEQ ID NO: 12572 - RNA, 20 nt, synthetic construct
  source 1..20: mol_type = other RNA
ggtgaagagccaaagttaga

SEQ ID NO: 12573 - RNA, 20 nt, synthetic construct
  source 1..20: mol_type = other RNA
ggtgaccagcttatgctgtt

SEQ ID NO: 12574 - RNA, 20 nt, synthetic construct
  source 1..20: mol_type = other RNA
ggtgacgggggttttgccgt

SEQ ID NO: 12575 - RNA, 20 nt, synthetic construct
  source 1..20: mol_type = other RNA
ggtgactcttgattcccggc

SEQ ID NO: 12576 - RNA, 20 nt, synthetic construct
  source 1..20: mol_type = other RNA
ggtgactgcttggcaaactc

SEQ ID NO: 12577 - RNA, 20 nt, synthetic construct
  source 1..20: mol_type = other RNA
ggtgagacagctgcacacct

SEQ ID NO: 12578 - RNA, 20 nt, synthetic construct
  source 1..20: mol_type = other RNA
ggtgaggaggggggtgtccg

SEQ ID NO: 12579 - RNA, 20 nt, synthetic construct
  source 1..20: mol_type = other RNA
ggtgaggctggtaccctgcc

SEQ ID NO: 12580 - RNA, 20 nt, synthetic construct
  source 1..20: mol_type = other RNA
ggtgagggacttggggggta

SEQ ID NO: 12581 - RNA, 20 nt, synthetic construct
  source 1..20: mol_type = other RNA
ggtgcaggaatgggggcagg

SEQ ID NO: 12582 - RNA, 20 nt, synthetic construct
  source 1..20: mol_type = other RNA
ggtgcccaggcctcaggcat

SEQ ID NO: 12583 - RNA, 20 nt, synthetic construct
  source 1..20: mol_type = other RNA
ggtgcgggaaccccacatgg

SEQ ID NO: 12584 - RNA, 20 nt, synthetic construct
  source 1..20: mol_type = other RNA
ggtgcgtcctaggtgttcac

SEQ ID NO: 12585 - RNA, 20 nt, synthetic construct
  source 1..20: mol_type = other RNA
ggtgcgtttcactgatcctg

SEQ ID NO: 12586 - RNA, 20 nt, synthetic construct
  source 1..20: mol_type = other RNA
ggtgctaggacagtggggaa

SEQ ID NO: 12587 - RNA, 20 nt, synthetic construct
  source 1..20: mol_type = other RNA
ggtgctgcagcttccttaca

SEQ ID NO: 12588 - RNA, 20 nt, synthetic construct
  source 1..20: mol_type = other RNA
ggtggaaataaacgagccga

SEQ ID NO: 12589 - RNA, 20 nt, synthetic construct
  source 1..20: mol_type = other RNA
ggtggacgaggaagggggac

SEQ ID NO: 12590 - RNA, 20 nt, synthetic construct
  source 1..20: mol_type = other RNA
ggtggagaaactggccggga

SEQ ID NO: 12591 - RNA, 20 nt, synthetic construct
  source 1..20: mol_type = other RNA
ggtggaggaaggccaccctg

SEQ ID NO: 12592 - RNA, 20 nt, synthetic construct
  source 1..20: mol_type = other RNA
ggtggagggactgggggcct

SEQ ID NO: 12593 - RNA, 20 nt, synthetic construct
  source 1..20: mol_type = other RNA
ggtggattctcctccaactg

SEQ ID NO: 12594 - RNA, 20 nt, synthetic construct
  source 1..20: mol_type = other RNA
ggtggccactgagaaccggg

SEQ ID NO: 12595 - RNA, 20 nt, synthetic construct
  source 1..20: mol_type = other RNA
ggtggcccgtgtcagcccct

SEQ ID NO: 12596 - RNA, 20 nt, synthetic construct
  source 1..20: mol_type = other RNA
ggtggcctctcgtggggtcc

SEQ ID NO: 12597 - RNA, 20 nt, synthetic construct
  source 1..20: mol_type = other RNA
ggtggcctggggcctctggg

SEQ ID NO: 12598 - RNA, 20 nt, synthetic construct
  source 1..20: mol_type = other RNA
ggtggccttcctccaccctg

SEQ ID NO: 12599 - RNA, 20 nt, synthetic construct
  source 1..20: mol_type = other RNA
ggtggcgcttccagtgctca

SEQ ID NO: 12600 - RNA, 20 nt, synthetic construct
  source 1..20: mol_type = other RNA
ggtgggctccgggacctgaa

SEQ ID NO: 12601 - RNA, 20 nt, synthetic construct
  source 1..20: mol_type = other RNA
ggtgggctggggttcagaga

SEQ ID NO: 12602 - RNA, 20 nt, synthetic construct
  source 1..20: mol_type = other RNA
ggtggtgacgggggttttgc

SEQ ID NO: 12603 - RNA, 20 nt, synthetic construct
  source 1..20: mol_type = other RNA
ggtggtttccgagcttgacc

SEQ ID NO: 12604 - RNA, 20 nt, synthetic construct
  source 1..20: mol_type = other RNA
ggtgtcccagcaagtcggga

SEQ ID NO: 12605 - RNA, 20 nt, synthetic construct
  source 1..20: mol_type = other RNA
ggtgtccgtgtggaaaactc

SEQ ID NO: 12606 - RNA, 20 nt, synthetic construct
  source 1..20: mol_type = other RNA
ggtgtgcagctgtctcaccc

SEQ ID NO: 12607 - RNA, 20 nt, synthetic construct
  source 1..20: mol_type = other RNA
ggtgtggggtgaccagctta

SEQ ID NO: 12608 - RNA, 20 nt, synthetic construct
  source 1..20: mol_type = other RNA
ggtgttcaccaggtcgtggc

SEQ ID NO: 12609 - RNA, 20 nt, synthetic construct
  source 1..20: mol_type = other RNA
ggttacgtggccaagaagca

SEQ ID NO: 12610 - RNA, 20 nt, synthetic construct
  source 1..20: mol_type = other RNA
ggttcagagaggagggattc

SEQ ID NO: 12611 - RNA, 20 nt, synthetic construct
  source 1..20: mol_type = other RNA
ggttccagcccctcctcctt

SEQ ID NO: 12612 - RNA, 20 nt, synthetic construct
  source 1..20: mol_type = other RNA
ggttcccgcacccagatgag

SEQ ID NO: 12613 - RNA, 20 nt, synthetic construct
  source 1..20: mol_type = other RNA
ggttcctggctctgctcttc

SEQ ID NO: 12614 - RNA, 20 nt, synthetic construct
  source 1..20: mol_type = other RNA
ggttctcagtggccaccctg

SEQ ID NO: 12615 - RNA, 20 nt, synthetic construct
  source 1..20: mol_type = other RNA
ggttctgggagagggtagcg

SEQ ID NO: 12616 - RNA, 20 nt, synthetic construct
  source 1..20: mol_type = other RNA
ggttgaatggggaggggttg

SEQ ID NO: 12617 - RNA, 20 nt, synthetic construct
  source 1..20: mol_type = other RNA
ggttgataaacccacgtggg

SEQ ID NO: 12618 - RNA, 20 nt, synthetic construct
  source 1..20: mol_type = other RNA
ggttgcccagtggtcaggcc

SEQ ID NO: 12619 - RNA, 20 nt, synthetic construct
  source 1..20: mol_type = other RNA
ggttgggcctggactctgga

SEQ ID NO: 12620 - RNA, 20 nt, synthetic construct
  source 1..20: mol_type = other RNA
ggttgggggctagagtagga

SEQ ID NO: 12621 - RNA, 20 nt, synthetic construct
  source 1..20: mol_type = other RNA
ggttggtcactgtctctggg

SEQ ID NO: 12622 - RNA, 20 nt, synthetic construct
  source 1..20: mol_type = other RNA
ggtttaaggcaggaggggct

SEQ ID NO: 12623 - RNA, 20 nt, synthetic construct
  source 1..20: mol_type = other RNA
ggtttatcaaccacttggtg

SEQ ID NO: 12624 - RNA, 20 nt, synthetic construct
  source 1..20: mol_type = other RNA
ggtttcagtgctaaaactag

SEQ ID NO: 12625 - RNA, 20 nt, synthetic construct
  source 1..20: mol_type = other RNA
ggtttccactgagcactgaa

SEQ ID NO: 12626 - RNA, 20 nt, synthetic construct
  source 1..20: mol_type = other RNA
ggtttccgagcttgaccctt

SEQ ID NO: 12627 - RNA, 20 nt, synthetic construct
  source 1..20: mol_type = other RNA
ggtttgagagaggaggggct

SEQ ID NO: 12628 - RNA, 20 nt, synthetic construct
  source 1..20: mol_type = other RNA
ggtttgagtccttggcaagc

SEQ ID NO: 12629 - RNA, 20 nt, synthetic construct
  source 1..20: mol_type = other RNA
ggtttgggtcaggtctgggt

SEQ ID NO: 12630 - RNA, 20 nt, synthetic construct
  source 1..20: mol_type = other RNA
ggttttgccgtgtctaacag

SEQ ID NO: 12631 - RNA, 20 nt, synthetic construct
  source 1..20: mol_type = other RNA
gtaaaactgacgcacggagg

SEQ ID NO: 12632 - RNA, 20 nt, synthetic construct
  source 1..20: mol_type = other RNA
gtaacctgagaagggaatcc

SEQ ID NO: 12633 - RNA, 20 nt, synthetic construct
  source 1..20: mol_type = other RNA
gtaaggaagctgcagcacca

SEQ ID NO: 12634 - RNA, 20 nt, synthetic construct
  source 1..20: mol_type = other RNA
gtaatttatcccgtggatct

SEQ ID NO: 12635 - RNA, 20 nt, synthetic construct
  source 1..20: mol_type = other RNA
gtacaggcatccctgtgaaa

SEQ ID NO: 12636 - RNA, 20 nt, synthetic construct
  source 1..20: mol_type = other RNA
gtaccagcctcaccaagtgg

SEQ ID NO: 12637 - RNA, 20 nt, synthetic construct
  source 1..20: mol_type = other RNA
gtaccatgtggggttcccgc

SEQ ID NO: 12638 - RNA, 20 nt, synthetic construct
  source 1..20: mol_type = other RNA
gtaccccacgtgggtttatc

SEQ ID NO: 12639 - RNA, 20 nt, synthetic construct
  source 1..20: mol_type = other RNA
gtaccctaagaacttgggaa

SEQ ID NO: 12640 - RNA, 20 nt, synthetic construct
  source 1..20: mol_type = other RNA
gtaccctgcccccattcctg

SEQ ID NO: 12641 - RNA, 20 nt, synthetic construct
  source 1..20: mol_type = other RNA
gtacctgttagacacggcaa

SEQ ID NO: 12642 - RNA, 20 nt, synthetic construct
  source 1..20: mol_type = other RNA
gtactgggcaggtccttgaa

SEQ ID NO: 12643 - RNA, 20 nt, synthetic construct
  source 1..20: mol_type = other RNA
gtagacagggctggggtggc

SEQ ID NO: 12644 - RNA, 20 nt, synthetic construct
  source 1..20: mol_type = other RNA
gtagaggcggccacgacctg

SEQ ID NO: 12645 - RNA, 20 nt, synthetic construct
  source 1..20: mol_type = other RNA
gtagccagccccgtcctggc

SEQ ID NO: 12646 - RNA, 20 nt, synthetic construct
  source 1..20: mol_type = other RNA
gtagcgcagggtggccactg

SEQ ID NO: 12647 - RNA, 20 nt, synthetic construct
  source 1..20: mol_type = other RNA
gtagctccctcccgcctcct

SEQ ID NO: 12648 - RNA, 20 nt, synthetic construct
  source 1..20: mol_type = other RNA
gtaggaggggctggagccag

SEQ ID NO: 12649 - RNA, 20 nt, synthetic construct
  source 1..20: mol_type = other RNA
gtagggaaggggcaggagag

SEQ ID NO: 12650 - RNA, 20 nt, synthetic construct
  source 1..20: mol_type = other RNA
gtaggtggcctggggcctct

SEQ ID NO: 12651 - RNA, 20 nt, synthetic construct
  source 1..20: mol_type = other RNA
gtatcccaggaggcctggag

SEQ ID NO: 12652 - RNA, 20 nt, synthetic construct
  source 1..20: mol_type = other RNA
gtatctgctggggtggtttc

SEQ ID NO: 12653 - RNA, 20 nt, synthetic construct
  source 1..20: mol_type = other RNA
gtatcttaaacagccagtgg

SEQ ID NO: 12654 - RNA, 20 nt, synthetic construct
  source 1..20: mol_type = other RNA
gtcaagctcggaaaccaccc

SEQ ID NO: 12655 - RNA, 20 nt, synthetic construct
  source 1..20: mol_type = other RNA
gtcacactccagttcactga

SEQ ID NO: 12656 - RNA, 20 nt, synthetic construct
  source 1..20: mol_type = other RNA
gtcaccacccacaggtggcg

SEQ ID NO: 12657 - RNA, 20 nt, synthetic construct
  source 1..20: mol_type = other RNA
gtcacccagagacagtgacc

SEQ ID NO: 12658 - RNA, 20 nt, synthetic construct
  source 1..20: mol_type = other RNA
gtcaccccacacccagacct

SEQ ID NO: 12659 - RNA, 20 nt, synthetic construct
  source 1..20: mol_type = other RNA
gtcaccccacagttggagga

SEQ ID NO: 12660 - RNA, 20 nt, synthetic construct
  source 1..20: mol_type = other RNA
gtcactgtctctgggtgact

SEQ ID NO: 12661 - RNA, 20 nt, synthetic construct
  source 1..20: mol_type = other RNA
gtcagagcagctcaggttct

SEQ ID NO: 12662 - RNA, 20 nt, synthetic construct
  source 1..20: mol_type = other RNA
gtcagcccctggctgcaggg

SEQ ID NO: 12663 - RNA, 20 nt, synthetic construct
  source 1..20: mol_type = other RNA
gtcaggccggccaggccttc

SEQ ID NO: 12664 - RNA, 20 nt, synthetic construct
  source 1..20: mol_type = other RNA
gtcaggtctgggtgtggggt

SEQ ID NO: 12665 - RNA, 20 nt, synthetic construct
  source 1..20: mol_type = other RNA
gtcagttttacctgtgagat

SEQ ID NO: 12666 - RNA, 20 nt, synthetic construct
  source 1..20: mol_type = other RNA
gtcatggaaactcgggctgt

SEQ ID NO: 12667 - RNA, 20 nt, synthetic construct
  source 1..20: mol_type = other RNA
gtcatggcgataggggaggg

SEQ ID NO: 12668 - RNA, 20 nt, synthetic construct
  source 1..20: mol_type = other RNA
gtcattttccccactgtcct

SEQ ID NO: 12669 - RNA, 20 nt, synthetic construct
  source 1..20: mol_type = other RNA
gtccaaaacttggggggaca

SEQ ID NO: 12670 - RNA, 20 nt, synthetic construct
  source 1..20: mol_type = other RNA
gtccacaaggcctggggcaa

SEQ ID NO: 12671 - RNA, 20 nt, synthetic construct
  source 1..20: mol_type = other RNA
gtccaccatctcatgcccct

SEQ ID NO: 12672 - RNA, 20 nt, synthetic construct
  source 1..20: mol_type = other RNA
gtccaggccaagtaggtggc

SEQ ID NO: 12673 - RNA, 20 nt, synthetic construct
  source 1..20: mol_type = other RNA
gtccaggcccaacccctccc

SEQ ID NO: 12674 - RNA, 20 nt, synthetic construct
  source 1..20: mol_type = other RNA
gtccaggcccagccccgcct

SEQ ID NO: 12675 - RNA, 20 nt, synthetic construct
  source 1..20: mol_type = other RNA
gtccaggccccagcccctcc

SEQ ID NO: 12676 - RNA, 20 nt, synthetic construct
  source 1..20: mol_type = other RNA
gtccaggcccccagcctctc

SEQ ID NO: 12677 - RNA, 20 nt, synthetic construct
  source 1..20: mol_type = other RNA
gtccaggcccccagtccctc

SEQ ID NO: 12678 - RNA, 20 nt, synthetic construct
  source 1..20: mol_type = other RNA
gtccagggggtcggaggagg

SEQ ID NO: 12679 - RNA, 20 nt, synthetic construct
  source 1..20: mol_type = other RNA
gtcccagatagcactgggga

SEQ ID NO: 12680 - RNA, 20 nt, synthetic construct
  source 1..20: mol_type = other RNA
gtcccagcaagtcgggactc

SEQ ID NO: 12681 - RNA, 20 nt, synthetic construct
  source 1..20: mol_type = other RNA
gtcccagcacagggtggcct

SEQ ID NO: 12682 - RNA, 20 nt, synthetic construct
  source 1..20: mol_type = other RNA
gtccccaagcatcgcccccc

SEQ ID NO: 12683 - RNA, 20 nt, synthetic construct
  source 1..20: mol_type = other RNA
gtccccaatttatattgttc

SEQ ID NO: 12684 - RNA, 20 nt, synthetic construct
  source 1..20: mol_type = other RNA
gtccccagtgctatctggga

SEQ ID NO: 12685 - RNA, 20 nt, synthetic construct
  source 1..20: mol_type = other RNA
gtccccccaagttttggacc

SEQ ID NO: 12686 - RNA, 20 nt, synthetic construct
  source 1..20: mol_type = other RNA
gtcccccttcctcgtccacc

SEQ ID NO: 12687 - RNA, 20 nt, synthetic construct
  source 1..20: mol_type = other RNA
gtcccgacttgctgggacac

SEQ ID NO: 12688 - RNA, 20 nt, synthetic construct
  source 1..20: mol_type = other RNA
gtcccgcccaggcccctgag

SEQ ID NO: 12689 - RNA, 20 nt, synthetic construct
  source 1..20: mol_type = other RNA
gtcccgcttccctaaggccc

SEQ ID NO: 12690 - RNA, 20 nt, synthetic construct
  source 1..20: mol_type = other RNA
gtcccggagcccacccagtg

SEQ ID NO: 12691 - RNA, 20 nt, synthetic construct
  source 1..20: mol_type = other RNA
gtccctcacctctccaaagc

SEQ ID NO: 12692 - RNA, 20 nt, synthetic construct
  source 1..20: mol_type = other RNA
gtccctccaccctcagaccc

SEQ ID NO: 12693 - RNA, 20 nt, synthetic construct
  source 1..20: mol_type = other RNA
gtccctcctccgaccccctg

SEQ ID NO: 12694 - RNA, 20 nt, synthetic construct
  source 1..20: mol_type = other RNA
gtccctggatctgttttcgt

SEQ ID NO: 12695 - RNA, 20 nt, synthetic construct
  source 1..20: mol_type = other RNA
gtccctggtgcccaggcctc

SEQ ID NO: 12696 - RNA, 20 nt, synthetic construct
  source 1..20: mol_type = other RNA
gtccgtgtggaaaactccct

SEQ ID NO: 12697 - RNA, 20 nt, synthetic construct
  source 1..20: mol_type = other RNA
gtcctagcaccgtgtccctg

SEQ ID NO: 12698 - RNA, 20 nt, synthetic construct
  source 1..20: mol_type = other RNA
gtcctaggaaaacagggatg

SEQ ID NO: 12699 - RNA, 20 nt, synthetic construct
  source 1..20: mol_type = other RNA
gtcctaggtgttcaccaggt

SEQ ID NO: 12700 - RNA, 20 nt, synthetic construct
  source 1..20: mol_type = other RNA
gtcctgagttctaactttgg

SEQ ID NO: 12701 - RNA, 20 nt, synthetic construct
  source 1..20: mol_type = other RNA
gtcctgcatccttctccagg

SEQ ID NO: 12702 - RNA, 20 nt, synthetic construct
  source 1..20: mol_type = other RNA
gtcctggcagggctgtggtg

SEQ ID NO: 12703 - RNA, 20 nt, synthetic construct
  source 1..20: mol_type = other RNA
gtcctggcccccagcccctc

SEQ ID NO: 12704 - RNA, 20 nt, synthetic construct
  source 1..20: mol_type = other RNA
gtcctgggcaaacagcataa

SEQ ID NO: 12705 - RNA, 20 nt, synthetic construct
  source 1..20: mol_type = other RNA
gtccttccaagggtcaagct

SEQ ID NO: 12706 - RNA, 20 nt, synthetic construct
  source 1..20: mol_type = other RNA
gtccttgaaagggaaaggcc

SEQ ID NO: 12707 - RNA, 20 nt, synthetic construct
  source 1..20: mol_type = other RNA
gtccttggcaagcccaggag

SEQ ID NO: 12708 - RNA, 20 nt, synthetic construct
  source 1..20: mol_type = other RNA
gtcctttcgtggtttccact

SEQ ID NO: 12709 - RNA, 20 nt, synthetic construct
  source 1..20: mol_type = other RNA
gtcggaggagggacttgccc

SEQ ID NO: 12710 - RNA, 20 nt, synthetic construct
  source 1..20: mol_type = other RNA
gtcgggactccagagggagc

SEQ ID NO: 12711 - RNA, 20 nt, synthetic construct
  source 1..20: mol_type = other RNA
gtcgtggccgcctctactcc

SEQ ID NO: 12712 - RNA, 20 nt, synthetic construct
  source 1..20: mol_type = other RNA
gtctaacaggtaccatgtgg

SEQ ID NO: 12713 - RNA, 20 nt, synthetic construct
  source 1..20: mol_type = other RNA
gtctaccaggctgccttttg

SEQ ID NO: 12714 - RNA, 20 nt, synthetic construct
  source 1..20: mol_type = other RNA
gtctcacccctctgggagtc

SEQ ID NO: 12715 - RNA, 20 nt, synthetic construct
  source 1..20: mol_type = other RNA
gtctctgggtgactcttgat

SEQ ID NO: 12716 - RNA, 20 nt, synthetic construct
  source 1..20: mol_type = other RNA
gtctgaagagcagagccagg

SEQ ID NO: 12717 - RNA, 20 nt, synthetic construct
  source 1..20: mol_type = other RNA
gtctgaatggggagaggctg

SEQ ID NO: 12718 - RNA, 20 nt, synthetic construct
  source 1..20: mol_type = other RNA
gtctgagcactggaagcgcc

SEQ ID NO: 12719 - RNA, 20 nt, synthetic construct
  source 1..20: mol_type = other RNA
gtctgagggtggagggactg

SEQ ID NO: 12720 - RNA, 20 nt, synthetic construct
  source 1..20: mol_type = other RNA
gtctgggtgtggggtgacca

SEQ ID NO: 12721 - RNA, 20 nt, synthetic construct
  source 1..20: mol_type = other RNA
gtctggtgcgtttcactgat

SEQ ID NO: 12722 - RNA, 20 nt, synthetic construct
  source 1..20: mol_type = other RNA
gtctgtcccagcacagggtg

SEQ ID NO: 12723 - RNA, 20 nt, synthetic construct
  source 1..20: mol_type = other RNA
gtcttagggaggcggggctg

SEQ ID NO: 12724 - RNA, 20 nt, synthetic construct
  source 1..20: mol_type = other RNA
gtgaaacgcaccagacggcc

SEQ ID NO: 12725 - RNA, 20 nt, synthetic construct
  source 1..20: mol_type = other RNA
gtgaaagatgcctgaggcct

SEQ ID NO: 12726 - RNA, 20 nt, synthetic construct
  source 1..20: mol_type = other RNA
gtgaacacctaggacgcacc

SEQ ID NO: 12727 - RNA, 20 nt, synthetic construct
  source 1..20: mol_type = other RNA
gtgaacggggaagggagggg

SEQ ID NO: 12728 - RNA, 20 nt, synthetic construct
  source 1..20: mol_type = other RNA
gtgaactggagtgtgacagc

SEQ ID NO: 12729 - RNA, 20 nt, synthetic construct
  source 1..20: mol_type = other RNA
gtgaagagccaaagttagaa

SEQ ID NO: 12730 - RNA, 20 nt, synthetic construct
  source 1..20: mol_type = other RNA
gtgaagctaaactcctagat

SEQ ID NO: 12731 - RNA, 20 nt, synthetic construct
  source 1..20: mol_type = other RNA
gtgaaggggccgcacgtgcc

SEQ ID NO: 12732 - RNA, 20 nt, synthetic construct
  source 1..20: mol_type = other RNA
gtgacagcctggggcccagg

SEQ ID NO: 12733 - RNA, 20 nt, synthetic construct
  source 1..20: mol_type = other RNA
gtgaccaaccatccctgttt

SEQ ID NO: 12734 - RNA, 20 nt, synthetic construct
  source 1..20: mol_type = other RNA
gtgaccagcttatgctgttt

SEQ ID NO: 12735 - RNA, 20 nt, synthetic construct
  source 1..20: mol_type = other RNA
gtgacctgcccggttctcag

SEQ ID NO: 12736 - RNA, 20 nt, synthetic construct
  source 1..20: mol_type = other RNA
gtgacgggggttttgccgtg

SEQ ID NO: 12737 - RNA, 20 nt, synthetic construct
  source 1..20: mol_type = other RNA
gtgactcttgattcccggcc

SEQ ID NO: 12738 - RNA, 20 nt, synthetic construct
  source 1..20: mol_type = other RNA
gtgactgcttggcaaactca

SEQ ID NO: 12739 - RNA, 20 nt, synthetic construct
  source 1..20: mol_type = other RNA
gtgagaatggtgcgtcctag

SEQ ID NO: 12740 - RNA, 20 nt, synthetic construct
  source 1..20: mol_type = other RNA
gtgagacagctgcacacctg

SEQ ID NO: 12741 - RNA, 20 nt, synthetic construct
  source 1..20: mol_type = other RNA
gtgagataaggccagtagcc

SEQ ID NO: 12742 - RNA, 20 nt, synthetic construct
  source 1..20: mol_type = other RNA
gtgaggaggggggtgtccgt

SEQ ID NO: 12743 - RNA, 20 nt, synthetic construct
  source 1..20: mol_type = other RNA
gtgaggctggtaccctgccc

SEQ ID NO: 12744 - RNA, 20 nt, synthetic construct
  source 1..20: mol_type = other RNA
gtgagggacttggggggtaa

SEQ ID NO: 12745 - RNA, 20 nt, synthetic construct
  source 1..20: mol_type = other RNA
gtgagtttgccaagcagtca

SEQ ID NO: 12746 - RNA, 20 nt, synthetic construct
  source 1..20: mol_type = other RNA
gtgcagagggggcctcagtg

SEQ ID NO: 12747 - RNA, 20 nt, synthetic construct
  source 1..20: mol_type = other RNA
gtgcagctgtctcacccctc

SEQ ID NO: 12748 - RNA, 20 nt, synthetic construct
  source 1..20: mol_type = other RNA
gtgcaggaatgggggcaggg

SEQ ID NO: 12749 - RNA, 20 nt, synthetic construct
  source 1..20: mol_type = other RNA
gtgcccaggcctcaggcatc

SEQ ID NO: 12750 - RNA, 20 nt, synthetic construct
  source 1..20: mol_type = other RNA
gtgccctgggaacgggatga

SEQ ID NO: 12751 - RNA, 20 nt, synthetic construct
  source 1..20: mol_type = other RNA
gtgcctgggccccaggctgt

SEQ ID NO: 12752 - RNA, 20 nt, synthetic construct
  source 1..20: mol_type = other RNA
gtgcggccccttcacagccc

SEQ ID NO: 12753 - RNA, 20 nt, synthetic construct
  source 1..20: mol_type = other RNA
gtgcgggaaccccacatggt

SEQ ID NO: 12754 - RNA, 20 nt, synthetic construct
  source 1..20: mol_type = other RNA
gtgcgtcagttttacctgtg

SEQ ID NO: 12755 - RNA, 20 nt, synthetic construct
  source 1..20: mol_type = other RNA
gtgcgtcctaggtgttcacc

SEQ ID NO: 12756 - RNA, 20 nt, synthetic construct
  source 1..20: mol_type = other RNA
gtgcgtttcactgatcctgg

SEQ ID NO: 12757 - RNA, 20 nt, synthetic construct
  source 1..20: mol_type = other RNA
gtgctaaaactaggctgtcc

SEQ ID NO: 12758 - RNA, 20 nt, synthetic construct
  source 1..20: mol_type = other RNA
gtgctaggacagtggggaaa

SEQ ID NO: 12759 - RNA, 20 nt, synthetic construct
  source 1..20: mol_type = other RNA
gtgctatctgggacatattc

SEQ ID NO: 12760 - RNA, 20 nt, synthetic construct
  source 1..20: mol_type = other RNA
gtgctcagactagggaagag

SEQ ID NO: 12761 - RNA, 20 nt, synthetic construct
  source 1..20: mol_type = other RNA
gtgctcagtggaaaccacga

SEQ ID NO: 12762 - RNA, 20 nt, synthetic construct
  source 1..20: mol_type = other RNA
gtgctgcagcttccttacac

SEQ ID NO: 12763 - RNA, 20 nt, synthetic construct
  source 1..20: mol_type = other RNA
gtgctgggacagactcaggg

SEQ ID NO: 12764 - RNA, 20 nt, synthetic construct
  source 1..20: mol_type = other RNA
gtggaaaactccctttgtga

SEQ ID NO: 12765 - RNA, 20 nt, synthetic construct
  source 1..20: mol_type = other RNA
gtggaaaccacgaaaggact

SEQ ID NO: 12766 - RNA, 20 nt, synthetic construct
  source 1..20: mol_type = other RNA
gtggaaataaacgagccgag

SEQ ID NO: 12767 - RNA, 20 nt, synthetic construct
  source 1..20: mol_type = other RNA
gtggacactgggtgggctcc

SEQ ID NO: 12768 - RNA, 20 nt, synthetic construct
  source 1..20: mol_type = other RNA
gtggacgaggaagggggaca

SEQ ID NO: 12769 - RNA, 20 nt, synthetic construct
  source 1..20: mol_type = other RNA
gtggagaaactggccgggaa

SEQ ID NO: 12770 - RNA, 20 nt, synthetic construct
  source 1..20: mol_type = other RNA
gtggaggaaggccaccctgt

SEQ ID NO: 12771 - RNA, 20 nt, synthetic construct
  source 1..20: mol_type = other RNA
gtggagggactgggggcctg

SEQ ID NO: 12772 - RNA, 20 nt, synthetic construct
  source 1..20: mol_type = other RNA
gtggatctaggagtttagct

SEQ ID NO: 12773 - RNA, 20 nt, synthetic construct
  source 1..20: mol_type = other RNA
gtggattctcctccaactgt

SEQ ID NO: 12774 - RNA, 20 nt, synthetic construct
  source 1..20: mol_type = other RNA
gtggccaagaagcaggggag

SEQ ID NO: 12775 - RNA, 20 nt, synthetic construct
  source 1..20: mol_type = other RNA
gtggccaccctgcgctaccc

SEQ ID NO: 12776 - RNA, 20 nt, synthetic construct
  source 1..20: mol_type = other RNA
gtggccactgagaaccgggc

SEQ ID NO: 12777 - RNA, 20 nt, synthetic construct
  source 1..20: mol_type = other RNA
gtggccagaggctgttgggt

SEQ ID NO: 12778 - RNA, 20 nt, synthetic construct
  source 1..20: mol_type = other RNA
gtggcccgtgtcagcccctg

SEQ ID NO: 12779 - RNA, 20 nt, synthetic construct
  source 1..20: mol_type = other RNA
gtggccgcctctactccctt

SEQ ID NO: 12780 - RNA, 20 nt, synthetic construct
  source 1..20: mol_type = other RNA
gtggcctctcgtggggtcca

SEQ ID NO: 12781 - RNA, 20 nt, synthetic construct
  source 1..20: mol_type = other RNA
gtggcctggggcctctgggg

SEQ ID NO: 12782 - RNA, 20 nt, synthetic construct
  source 1..20: mol_type = other RNA
gtggccttcctccaccctgc

SEQ ID NO: 12783 - RNA, 20 nt, synthetic construct
  source 1..20: mol_type = other RNA
gtggcgcttccagtgctcag

SEQ ID NO: 12784 - RNA, 20 nt, synthetic construct
  source 1..20: mol_type = other RNA
gtggctagggggttgggggc

SEQ ID NO: 12785 - RNA, 20 nt, synthetic construct
  source 1..20: mol_type = other RNA
gtggctccctctggagtccc

SEQ ID NO: 12786 - RNA, 20 nt, synthetic construct
  source 1..20: mol_type = other RNA
gtggctgttcccaagttctt

SEQ ID NO: 12787 - RNA, 20 nt, synthetic construct
  source 1..20: mol_type = other RNA
gtgggcccagggctatgcag

SEQ ID NO: 12788 - RNA, 20 nt, synthetic construct
  source 1..20: mol_type = other RNA
gtgggctccgggacctgaac

SEQ ID NO: 12789 - RNA, 20 nt, synthetic construct
  source 1..20: mol_type = other RNA
gtgggctggggttcagagag

SEQ ID NO: 12790 - RNA, 20 nt, synthetic construct
  source 1..20: mol_type = other RNA
gtggggaaaatgacccaaca

SEQ ID NO: 12791 - RNA, 20 nt, synthetic construct
  source 1..20: mol_type = other RNA
gtggggtaccctaagaactt

SEQ ID NO: 12792 - RNA, 20 nt, synthetic construct
  source 1..20: mol_type = other RNA
gtggggtccaggccaagtag

SEQ ID NO: 12793 - RNA, 20 nt, synthetic construct
  source 1..20: mol_type = other RNA
gtggggtgaccagcttatgc

SEQ ID NO: 12794 - RNA, 20 nt, synthetic construct
  source 1..20: mol_type = other RNA
gtggggtgactgcttggcaa

SEQ ID NO: 12795 - RNA, 20 nt, synthetic construct
  source 1..20: mol_type = other RNA
gtggggttcccgcacccaga

SEQ ID NO: 12796 - RNA, 20 nt, synthetic construct
  source 1..20: mol_type = other RNA
gtgggtggtgacgggggttt

SEQ ID NO: 12797 - RNA, 20 nt, synthetic construct
  source 1..20: mol_type = other RNA
gtgggtttatcaaccacttg

SEQ ID NO: 12798 - RNA, 20 nt, synthetic construct
  source 1..20: mol_type = other RNA
gtggtcaggccggccaggcc

SEQ ID NO: 12799 - RNA, 20 nt, synthetic construct
  source 1..20: mol_type = other RNA
gtggtgacgggggttttgcc

SEQ ID NO: 12800 - RNA, 20 nt, synthetic construct
  source 1..20: mol_type = other RNA
gtggtgaggaggggggtgtc

SEQ ID NO: 12801 - RNA, 20 nt, synthetic construct
  source 1..20: mol_type = other RNA
gtggttgataaacccacgtg

SEQ ID NO: 12802 - RNA, 20 nt, synthetic construct
  source 1..20: mol_type = other RNA
gtggtttccactgagcactg

SEQ ID NO: 12803 - RNA, 20 nt, synthetic construct
  source 1..20: mol_type = other RNA
gtggtttccgagcttgaccc

SEQ ID NO: 12804 - RNA, 20 nt, synthetic construct
  source 1..20: mol_type = other RNA
gtgtaaggaagctgcagcac

SEQ ID NO: 12805 - RNA, 20 nt, synthetic construct
  source 1..20: mol_type = other RNA
gtgtcagcccctggctgcag

SEQ ID NO: 12806 - RNA, 20 nt, synthetic construct
  source 1..20: mol_type = other RNA
gtgtccacaaggcctggggc

SEQ ID NO: 12807 - RNA, 20 nt, synthetic construct
  source 1..20: mol_type = other RNA
gtgtcccagcaagtcgggac

SEQ ID NO: 12808 - RNA, 20 nt, synthetic construct
  source 1..20: mol_type = other RNA
gtgtccctggatctgttttc

SEQ ID NO: 12809 - RNA, 20 nt, synthetic construct
  source 1..20: mol_type = other RNA
gtgtccgtgtggaaaactcc

SEQ ID NO: 12810 - RNA, 20 nt, synthetic construct
  source 1..20: mol_type = other RNA
gtgtctaacaggtaccatgt

SEQ ID NO: 12811 - RNA, 20 nt, synthetic construct
  source 1..20: mol_type = other RNA
gtgtgacagcctggggccca

SEQ ID NO: 12812 - RNA, 20 nt, synthetic construct
  source 1..20: mol_type = other RNA
gtgtgcagctgtctcacccc

SEQ ID NO: 12813 - RNA, 20 nt, synthetic construct
  source 1..20: mol_type = other RNA
gtgtgcctgggccccaggct

SEQ ID NO: 12814 - RNA, 20 nt, synthetic construct
  source 1..20: mol_type = other RNA
gtgtggaaaactccctttgt

SEQ ID NO: 12815 - RNA, 20 nt, synthetic construct
  source 1..20: mol_type = other RNA
gtgtggggtgaccagcttat

SEQ ID NO: 12816 - RNA, 20 nt, synthetic construct
  source 1..20: mol_type = other RNA
gtgttcaccaggtcgtggcc

SEQ ID NO: 12817 - RNA, 20 nt, synthetic construct
  source 1..20: mol_type = other RNA
gtgtttctcgtcctgcatcc

SEQ ID NO: 12818 - RNA, 20 nt, synthetic construct
  source 1..20: mol_type = other RNA
gttacgtggccaagaagcag

SEQ ID NO: 12819 - RNA, 20 nt, synthetic construct
  source 1..20: mol_type = other RNA
gttagaactcaggaccaact

SEQ ID NO: 12820 - RNA, 20 nt, synthetic construct
  source 1..20: mol_type = other RNA
gttagacacggcaaaacccc

SEQ ID NO: 12821 - RNA, 20 nt, synthetic construct
  source 1..20: mol_type = other RNA
gttcaccaggtcgtggccgc

SEQ ID NO: 12822 - RNA, 20 nt, synthetic construct
  source 1..20: mol_type = other RNA
gttcactgaggccccctctg

SEQ ID NO: 12823 - RNA, 20 nt, synthetic construct
  source 1..20: mol_type = other RNA
gttcacttcctgtttgcaga

SEQ ID NO: 12824 - RNA, 20 nt, synthetic construct
  source 1..20: mol_type = other RNA
gttcagagaggagggattcc

SEQ ID NO: 12825 - RNA, 20 nt, synthetic construct
  source 1..20: mol_type = other RNA
gttcagccctaagaatcctg

SEQ ID NO: 12826 - RNA, 20 nt, synthetic construct
  source 1..20: mol_type = other RNA
gttcaggtcccggagcccac

SEQ ID NO: 12827 - RNA, 20 nt, synthetic construct
  source 1..20: mol_type = other RNA
gttcatcccgttcccagggc

SEQ ID NO: 12828 - RNA, 20 nt, synthetic construct
  source 1..20: mol_type = other RNA
gttccagcccctcctccttc

SEQ ID NO: 12829 - RNA, 20 nt, synthetic construct
  source 1..20: mol_type = other RNA
gttcccaagttcttagggta

SEQ ID NO: 12830 - RNA, 20 nt, synthetic construct
  source 1..20: mol_type = other RNA
gttcccagggcacgtgcggc

SEQ ID NO: 12831 - RNA, 20 nt, synthetic construct
  source 1..20: mol_type = other RNA
gttcccctgcatcccccttc

SEQ ID NO: 12832 - RNA, 20 nt, synthetic construct
  source 1..20: mol_type = other RNA
gttcccctgcatccccgttc

SEQ ID NO: 12833 - RNA, 20 nt, synthetic construct
  source 1..20: mol_type = other RNA
gttcccgcacccagatgaga

SEQ ID NO: 12834 - RNA, 20 nt, synthetic construct
  source 1..20: mol_type = other RNA
gttcctccgtgcgtcagttt

SEQ ID NO: 12835 - RNA, 20 nt, synthetic construct
  source 1..20: mol_type = other RNA
gttcctgcagagtatctgct

SEQ ID NO: 12836 - RNA, 20 nt, synthetic construct
  source 1..20: mol_type = other RNA
gttcctggctctgctcttca

SEQ ID NO: 12837 - RNA, 20 nt, synthetic construct
  source 1..20: mol_type = other RNA
gttctaactttggctcttca

SEQ ID NO: 12838 - RNA, 20 nt, synthetic construct
  source 1..20: mol_type = other RNA
gttctcagtggccaccctgc

SEQ ID NO: 12839 - RNA, 20 nt, synthetic construct
  source 1..20: mol_type = other RNA
gttctgggagagggtagcgc

SEQ ID NO: 12840 - RNA, 20 nt, synthetic construct
  source 1..20: mol_type = other RNA
gttcttagggtaccccacgt

SEQ ID NO: 12841 - RNA, 20 nt, synthetic construct
  source 1..20: mol_type = other RNA
gttgaatggggaggggttgg

SEQ ID NO: 12842 - RNA, 20 nt, synthetic construct
  source 1..20: mol_type = other RNA
gttgataaacccacgtgggg

SEQ ID NO: 12843 - RNA, 20 nt, synthetic construct
  source 1..20: mol_type = other RNA
gttgcccagtggtcaggccg

SEQ ID NO: 12844 - RNA, 20 nt, synthetic construct
  source 1..20: mol_type = other RNA
gttggaggagaatccaccca

SEQ ID NO: 12845 - RNA, 20 nt, synthetic construct
  source 1..20: mol_type = other RNA
gttgggcctggactctggag

SEQ ID NO: 12846 - RNA, 20 nt, synthetic construct
  source 1..20: mol_type = other RNA
gttgggggctagagtaggag

SEQ ID NO: 12847 - RNA, 20 nt, synthetic construct
  source 1..20: mol_type = other RNA
gttgggtcattttccccact

SEQ ID NO: 12848 - RNA, 20 nt, synthetic construct
  source 1..20: mol_type = other RNA
gttggtcactgtctctgggt

SEQ ID NO: 12849 - RNA, 20 nt, synthetic construct
  source 1..20: mol_type = other RNA
gttggtcctgagttctaact

SEQ ID NO: 12850 - RNA, 20 nt, synthetic construct
  source 1..20: mol_type = other RNA
gttgtcatggcgatagggga

SEQ ID NO: 12851 - RNA, 20 nt, synthetic construct
  source 1..20: mol_type = other RNA
gtttaagatacgcctggttg

SEQ ID NO: 12852 - RNA, 20 nt, synthetic construct
  source 1..20: mol_type = other RNA
gtttaaggcaggaggggctg

SEQ ID NO: 12853 - RNA, 20 nt, synthetic construct
  source 1..20: mol_type = other RNA
gtttagcttcactccttcct

SEQ ID NO: 12854 - RNA, 20 nt, synthetic construct
  source 1..20: mol_type = other RNA
gtttatcaaccacttggtga

SEQ ID NO: 12855 - RNA, 20 nt, synthetic construct
  source 1..20: mol_type = other RNA
gtttatttccacccagttgt

SEQ ID NO: 12856 - RNA, 20 nt, synthetic construct
  source 1..20: mol_type = other RNA
gtttcactgatcctggtgct

SEQ ID NO: 12857 - RNA, 20 nt, synthetic construct
  source 1..20: mol_type = other RNA
gtttcagtgctaaaactagg

SEQ ID NO: 12858 - RNA, 20 nt, synthetic construct
  source 1..20: mol_type = other RNA
gtttccactgagcactgaag

SEQ ID NO: 12859 - RNA, 20 nt, synthetic construct
  source 1..20: mol_type = other RNA
gtttccatgacctcatgctc

SEQ ID NO: 12860 - RNA, 20 nt, synthetic construct
  source 1..20: mol_type = other RNA
gtttccgagcttgacccttg

SEQ ID NO: 12861 - RNA, 20 nt, synthetic construct
  source 1..20: mol_type = other RNA
gtttctcattcttcccttag

SEQ ID NO: 12862 - RNA, 20 nt, synthetic construct
  source 1..20: mol_type = other RNA
gtttctccacctggggctgt

SEQ ID NO: 12863 - RNA, 20 nt, synthetic construct
  source 1..20: mol_type = other RNA
gtttctcgtcctgcatcctt

SEQ ID NO: 12864 - RNA, 20 nt, synthetic construct
  source 1..20: mol_type = other RNA
gtttgagagaggaggggctg

SEQ ID NO: 12865 - RNA, 20 nt, synthetic construct
  source 1..20: mol_type = other RNA
gtttgagtccttggcaagcc

SEQ ID NO: 12866 - RNA, 20 nt, synthetic construct
  source 1..20: mol_type = other RNA
gtttgcagatagccaggagt

SEQ ID NO: 12867 - RNA, 20 nt, synthetic construct
  source 1..20: mol_type = other RNA
gtttgccaagcagtcacccc

SEQ ID NO: 12868 - RNA, 20 nt, synthetic construct
  source 1..20: mol_type = other RNA
gtttgcccaggacagcctag

SEQ ID NO: 12869 - RNA, 20 nt, synthetic construct
  source 1..20: mol_type = other RNA
gtttggaaaaacaaaatcag

SEQ ID NO: 12870 - RNA, 20 nt, synthetic construct
  source 1..20: mol_type = other RNA
gtttgggtcaggtctgggtg

SEQ ID NO: 12871 - RNA, 20 nt, synthetic construct
  source 1..20: mol_type = other RNA
gttttacctgtgagataagg

SEQ ID NO: 12872 - RNA, 20 nt, synthetic construct
  source 1..20: mol_type = other RNA
gttttagcactgaaaccctc

SEQ ID NO: 12873 - RNA, 20 nt, synthetic construct
  source 1..20: mol_type = other RNA
gttttccacacggacacccc

SEQ ID NO: 12874 - RNA, 20 nt, synthetic construct
  source 1..20: mol_type = other RNA
gttttcctaggactgagggt

SEQ ID NO: 12875 - RNA, 20 nt, synthetic construct
  source 1..20: mol_type = other RNA
gttttcgtggctccctctgg

SEQ ID NO: 12876 - RNA, 20 nt, synthetic construct
  source 1..20: mol_type = other RNA
gttttgccgtgtctaacagg

SEQ ID NO: 12877 - RNA, 20 nt, synthetic construct
  source 1..20: mol_type = other RNA
gttttggacccctaagggaa

SEQ ID NO: 12878 - RNA, 20 nt, synthetic construct
  source 1..20: mol_type = other RNA
gtttttccaaactgcttctc

SEQ ID NO: 12879 - RNA, 20 nt, synthetic construct
  source 1..20: mol_type = other RNA
taaaactaggctgtcctggg

SEQ ID NO: 12880 - RNA, 20 nt, synthetic construct
  source 1..20: mol_type = other RNA
taaaactgacgcacggagga

SEQ ID NO: 12881 - RNA, 20 nt, synthetic construct
  source 1..20: mol_type = other RNA
taaacagccagtggccagag

SEQ ID NO: 12882 - RNA, 20 nt, synthetic construct
  source 1..20: mol_type = other RNA
taaacccacgtggggtaccc

SEQ ID NO: 12883 - RNA, 20 nt, synthetic construct
  source 1..20: mol_type = other RNA
taaacccagccaggtccttc

SEQ ID NO: 12884 - RNA, 20 nt, synthetic construct
  source 1..20: mol_type = other RNA
taaacgagccgagttcatcc

SEQ ID NO: 12885 - RNA, 20 nt, synthetic construct
  source 1..20: mol_type = other RNA
taaactcctagatccacggg

SEQ ID NO: 12886 - RNA, 20 nt, synthetic construct
  source 1..20: mol_type = other RNA
taaagagtccccagtgctat

SEQ ID NO: 12887 - RNA, 20 nt, synthetic construct
  source 1..20: mol_type = other RNA
taaattaccccccaagtccc

SEQ ID NO: 12888 - RNA, 20 nt, synthetic construct
  source 1..20: mol_type = other RNA
taaattggggactagaaagg

SEQ ID NO: 12889 - RNA, 20 nt, synthetic construct
  source 1..20: mol_type = other RNA
taacaggtaccatgtggggt

SEQ ID NO: 12890 - RNA, 20 nt, synthetic construct
  source 1..20: mol_type = other RNA
taacctgagaagggaatccc

SEQ ID NO: 12891 - RNA, 20 nt, synthetic construct
  source 1..20: mol_type = other RNA
taactttggctcttcacctt

SEQ ID NO: 12892 - RNA, 20 nt, synthetic construct
  source 1..20: mol_type = other RNA
taagaacttgggaacagcca

SEQ ID NO: 12893 - RNA, 20 nt, synthetic construct
  source 1..20: mol_type = other RNA
taagaatcctggctccagcc

SEQ ID NO: 12894 - RNA, 20 nt, synthetic construct
  source 1..20: mol_type = other RNA
taagacccagaagtccaggc

SEQ ID NO: 12895 - RNA, 20 nt, synthetic construct
  source 1..20: mol_type = other RNA
taagatacgcctggttgccc

SEQ ID NO: 12896 - RNA, 20 nt, synthetic construct
  source 1..20: mol_type = other RNA
taagctggtcaccccacacc

SEQ ID NO: 12897 - RNA, 20 nt, synthetic construct
  source 1..20: mol_type = other RNA
taaggaaagaaggatggaga

SEQ ID NO: 12898 - RNA, 20 nt, synthetic construct
  source 1..20: mol_type = other RNA
taaggaagctgcagcaccag

SEQ ID NO: 12899 - RNA, 20 nt, synthetic construct
  source 1..20: mol_type = other RNA
taaggcaattggggtgcagg

SEQ ID NO: 12900 - RNA, 20 nt, synthetic construct
  source 1..20: mol_type = other RNA
taaggcaggaggggctgggg

SEQ ID NO: 12901 - RNA, 20 nt, synthetic construct
  source 1..20: mol_type = other RNA
taaggccagtagccagcccc

SEQ ID NO: 12902 - RNA, 20 nt, synthetic construct
  source 1..20: mol_type = other RNA
taaggccctgctctgggctt

SEQ ID NO: 12903 - RNA, 20 nt, synthetic construct
  source 1..20: mol_type = other RNA
taagggaagaatgagaaacg

SEQ ID NO: 12904 - RNA, 20 nt, synthetic construct
  source 1..20: mol_type = other RNA
taagttggtcctgagttcta

SEQ ID NO: 12905 - RNA, 20 nt, synthetic construct
  source 1..20: mol_type = other RNA
taatttatcccgtggatcta

SEQ ID NO: 12906 - RNA, 20 nt, synthetic construct
  source 1..20: mol_type = other RNA
tacacttcccaagaggagaa

SEQ ID NO: 12907 - RNA, 20 nt, synthetic construct
  source 1..20: mol_type = other RNA
tacaggcatccctgtgaaag

SEQ ID NO: 12908 - RNA, 20 nt, synthetic construct
  source 1..20: mol_type = other RNA
tacaggggttcctggctctg

SEQ ID NO: 12909 - RNA, 20 nt, synthetic construct
  source 1..20: mol_type = other RNA
taccagcctcaccaagtggt

SEQ ID NO: 12910 - RNA, 20 nt, synthetic construct
  source 1..20: mol_type = other RNA
taccaggctgccttttgggt

SEQ ID NO: 12911 - RNA, 20 nt, synthetic construct
  source 1..20: mol_type = other RNA
taccatgtggggttcccgca

SEQ ID NO: 12912 - RNA, 20 nt, synthetic construct
  source 1..20: mol_type = other RNA
taccccacgtgggtttatca

SEQ ID NO: 12913 - RNA, 20 nt, synthetic construct
  source 1..20: mol_type = other RNA
taccccccaagtccctcacc

SEQ ID NO: 12914 - RNA, 20 nt, synthetic construct
  source 1..20: mol_type = other RNA
taccccgaagagtgagtttg

SEQ ID NO: 12915 - RNA, 20 nt, synthetic construct
  source 1..20: mol_type = other RNA
taccctaagaacttgggaac

SEQ ID NO: 12916 - RNA, 20 nt, synthetic construct
  source 1..20: mol_type = other RNA
taccctctcccagaacctga

SEQ ID NO: 12917 - RNA, 20 nt, synthetic construct
  source 1..20: mol_type = other RNA
taccctgcccccattcctgc

SEQ ID NO: 12918 - RNA, 20 nt, synthetic construct
  source 1..20: mol_type = other RNA
tacctgtgagataaggccag

SEQ ID NO: 12919 - RNA, 20 nt, synthetic construct
  source 1..20: mol_type = other RNA
tacctgttagacacggcaaa

SEQ ID NO: 12920 - RNA, 20 nt, synthetic construct
  source 1..20: mol_type = other RNA
tacgagggccaagagcatga

SEQ ID NO: 12921 - RNA, 20 nt, synthetic construct
  source 1..20: mol_type = other RNA
tacgcctggttgcccagtgg

SEQ ID NO: 12922 - RNA, 20 nt, synthetic construct
  source 1..20: mol_type = other RNA
tacgtggccaagaagcaggg

SEQ ID NO: 12923 - RNA, 20 nt, synthetic construct
  source 1..20: mol_type = other RNA
tactccctttctctttctcc

SEQ ID NO: 12924 - RNA, 20 nt, synthetic construct
  source 1..20: mol_type = other RNA
tactctagcccccaaccccc

SEQ ID NO: 12925 - RNA, 20 nt, synthetic construct
  source 1..20: mol_type = other RNA
tactctgcaggaacgaagcc

SEQ ID NO: 12926 - RNA, 20 nt, synthetic construct
  source 1..20: mol_type = other RNA
tactggccttatctcacagg

SEQ ID NO: 12927 - RNA, 20 nt, synthetic construct
  source 1..20: mol_type = other RNA
tactgggcaggtccttgaaa

SEQ ID NO: 12928 - RNA, 20 nt, synthetic construct
  source 1..20: mol_type = other RNA
tacttggcctggaccccacg

SEQ ID NO: 12929 - RNA, 20 nt, synthetic construct
  source 1..20: mol_type = other RNA
tagaaaggtgaagagccaaa

SEQ ID NO: 12930 - RNA, 20 nt, synthetic construct
  source 1..20: mol_type = other RNA
tagaactcaggaccaactta

SEQ ID NO: 12931 - RNA, 20 nt, synthetic construct
  source 1..20: mol_type = other RNA
tagacacggcaaaacccccg

SEQ ID NO: 12932 - RNA, 20 nt, synthetic construct
  source 1..20: mol_type = other RNA
tagacagggctggggtggcc

SEQ ID NO: 12933 - RNA, 20 nt, synthetic construct
  source 1..20: mol_type = other RNA
tagaggcggccacgacctgg

SEQ ID NO: 12934 - RNA, 20 nt, synthetic construct
  source 1..20: mol_type = other RNA
tagagtaggaggggctggag

SEQ ID NO: 12935 - RNA, 20 nt, synthetic construct
  source 1..20: mol_type = other RNA
tagatccacgggataaatta

SEQ ID NO: 12936 - RNA, 20 nt, synthetic construct
  source 1..20: mol_type = other RNA
tagcaccgtgtccctggatc

SEQ ID NO: 12937 - RNA, 20 nt, synthetic construct
  source 1..20: mol_type = other RNA
tagcactgaaaccctcagtc

SEQ ID NO: 12938 - RNA, 20 nt, synthetic construct
  source 1..20: mol_type = other RNA
tagcactggggactctttaa

SEQ ID NO: 12939 - RNA, 20 nt, synthetic construct
  source 1..20: mol_type = other RNA
tagccactaaggcaattggg

SEQ ID NO: 12940 - RNA, 20 nt, synthetic construct
  source 1..20: mol_type = other RNA
tagccagccccgtcctggca

SEQ ID NO: 12941 - RNA, 20 nt, synthetic construct
  source 1..20: mol_type = other RNA
tagccaggagtcctttcgtg

SEQ ID NO: 12942 - RNA, 20 nt, synthetic construct
  source 1..20: mol_type = other RNA
tagcccccaaccccctagcc

SEQ ID NO: 12943 - RNA, 20 nt, synthetic construct
  source 1..20: mol_type = other RNA
tagccctgggcccacggctt

SEQ ID NO: 12944 - RNA, 20 nt, synthetic construct
  source 1..20: mol_type = other RNA
tagcgcagggtggccactga

SEQ ID NO: 12945 - RNA, 20 nt, synthetic construct
  source 1..20: mol_type = other RNA
tagctccctcccgcctcctc

SEQ ID NO: 12946 - RNA, 20 nt, synthetic construct
  source 1..20: mol_type = other RNA
tagcttcactccttcctcag

SEQ ID NO: 12947 - RNA, 20 nt, synthetic construct
  source 1..20: mol_type = other RNA
taggaaaacagggatggttg

SEQ ID NO: 12948 - RNA, 20 nt, synthetic construct
  source 1..20: mol_type = other RNA
taggacagtggggaaaatga

SEQ ID NO: 12949 - RNA, 20 nt, synthetic construct
  source 1..20: mol_type = other RNA
taggacgcaccattctcaca

SEQ ID NO: 12950 - RNA, 20 nt, synthetic construct
  source 1..20: mol_type = other RNA
taggactgagggtttcagtg

SEQ ID NO: 12951 - RNA, 20 nt, synthetic construct
  source 1..20: mol_type = other RNA
taggaggggctggagccagg

SEQ ID NO: 12952 - RNA, 20 nt, synthetic construct
  source 1..20: mol_type = other RNA
taggagtttagcttcactcc

SEQ ID NO: 12953 - RNA, 20 nt, synthetic construct
  source 1..20: mol_type = other RNA
taggctgtcctgggcaaaca

SEQ ID NO: 12954 - RNA, 20 nt, synthetic construct
  source 1..20: mol_type = other RNA
tagggaagaggttccagccc

SEQ ID NO: 12955 - RNA, 20 nt, synthetic construct
  source 1..20: mol_type = other RNA
tagggaagcgggaccctgct

SEQ ID NO: 12956 - RNA, 20 nt, synthetic construct
  source 1..20: mol_type = other RNA
tagggaaggggcaggagagc

SEQ ID NO: 12957 - RNA, 20 nt, synthetic construct
  source 1..20: mol_type = other RNA
tagggaggcggggctgggcc

SEQ ID NO: 12958 - RNA, 20 nt, synthetic construct
  source 1..20: mol_type = other RNA
tagggctgaacagagaagag

SEQ ID NO: 12959 - RNA, 20 nt, synthetic construct
  source 1..20: mol_type = other RNA
taggggaggggggcaaggag

SEQ ID NO: 12960 - RNA, 20 nt, synthetic construct
  source 1..20: mol_type = other RNA
tagggggttgggggctagag

SEQ ID NO: 12961 - RNA, 20 nt, synthetic construct
  source 1..20: mol_type = other RNA
taggggtccaaaacttgggg

SEQ ID NO: 12962 - RNA, 20 nt, synthetic construct
  source 1..20: mol_type = other RNA
tagggtaccccacgtgggtt

SEQ ID NO: 12963 - RNA, 20 nt, synthetic construct
  source 1..20: mol_type = other RNA
taggtggcctggggcctctg

SEQ ID NO: 12964 - RNA, 20 nt, synthetic construct
  source 1..20: mol_type = other RNA
taggtgttcaccaggtcgtg

SEQ ID NO: 12965 - RNA, 20 nt, synthetic construct
  source 1..20: mol_type = other RNA
tagtccccaatttatattgt

SEQ ID NO: 12966 - RNA, 20 nt, synthetic construct
  source 1..20: mol_type = other RNA
tagtctgagcactggaagcg

SEQ ID NO: 12967 - RNA, 20 nt, synthetic construct
  source 1..20: mol_type = other RNA
tagtggctagggggttgggg

SEQ ID NO: 12968 - RNA, 20 nt, synthetic construct
  source 1..20: mol_type = other RNA
tagttttagcactgaaaccc

SEQ ID NO: 12969 - RNA, 20 nt, synthetic construct
  source 1..20: mol_type = other RNA
tataaattggggactagaaa

SEQ ID NO: 12970 - RNA, 20 nt, synthetic construct
  source 1..20: mol_type = other RNA
tatattgttcctccgtgcgt

SEQ ID NO: 12971 - RNA, 20 nt, synthetic construct
  source 1..20: mol_type = other RNA
tatcaaccacttggtgaggc

SEQ ID NO: 12972 - RNA, 20 nt, synthetic construct
  source 1..20: mol_type = other RNA
tatcccaggaggcctggagc

SEQ ID NO: 12973 - RNA, 20 nt, synthetic construct
  source 1..20: mol_type = other RNA
tatcccgtggatctaggagt

SEQ ID NO: 12974 - RNA, 20 nt, synthetic construct
  source 1..20: mol_type = other RNA
tatcgccatgacaactgggt

SEQ ID NO: 12975 - RNA, 20 nt, synthetic construct
  source 1..20: mol_type = other RNA
tatctcacaggtaaaactga

SEQ ID NO: 12976 - RNA, 20 nt, synthetic construct
  source 1..20: mol_type = other RNA
tatctgcaaacaggaagtga

SEQ ID NO: 12977 - RNA, 20 nt, synthetic construct
  source 1..20: mol_type = other RNA
tatctgctggggtggtttcc

SEQ ID NO: 12978 - RNA, 20 nt, synthetic construct
  source 1..20: mol_type = other RNA
tatctgggacatattcctcc

SEQ ID NO: 12979 - RNA, 20 nt, synthetic construct
  source 1..20: mol_type = other RNA
tatcttaaacagccagtggc

SEQ ID NO: 12980 - RNA, 20 nt, synthetic construct
  source 1..20: mol_type = other RNA
tatgcagggtggaggaaggc

SEQ ID NO: 12981 - RNA, 20 nt, synthetic construct
  source 1..20: mol_type = other RNA
tatgctgtttgcccaggaca

SEQ ID NO: 12982 - RNA, 20 nt, synthetic construct
  source 1..20: mol_type = other RNA
tatgtcccagatagcactgg

SEQ ID NO: 12983 - RNA, 20 nt, synthetic construct
  source 1..20: mol_type = other RNA
tattcctccgcccagagcag

SEQ ID NO: 12984 - RNA, 20 nt, synthetic construct
  source 1..20: mol_type = other RNA
tattctgattttgtttttcc

SEQ ID NO: 12985 - RNA, 20 nt, synthetic construct
  source 1..20: mol_type = other RNA
tattgttcctccgtgcgtca

SEQ ID NO: 12986 - RNA, 20 nt, synthetic construct
  source 1..20: mol_type = other RNA
tatttccacccagttgtcat

SEQ ID NO: 12987 - RNA, 20 nt, synthetic construct
  source 1..20: mol_type = other RNA
tcaaacccagaagcccagag

SEQ ID NO: 12988 - RNA, 20 nt, synthetic construct
  source 1..20: mol_type = other RNA
tcaaacccaggagcccaggc

SEQ ID NO: 12989 - RNA, 20 nt, synthetic construct
  source 1..20: mol_type = other RNA
tcaaccacttggtgaggctg

SEQ ID NO: 12990 - RNA, 20 nt, synthetic construct
  source 1..20: mol_type = other RNA
tcaacccaggaggccaggcc

SEQ ID NO: 12991 - RNA, 20 nt, synthetic construct
  source 1..20: mol_type = other RNA
tcaagagtcacccagagaca

SEQ ID NO: 12992 - RNA, 20 nt, synthetic construct
  source 1..20: mol_type = other RNA
tcaagctcggaaaccacccc

SEQ ID NO: 12993 - RNA, 20 nt, synthetic construct
  source 1..20: mol_type = other RNA
tcaaggacctgcccagtaca

SEQ ID NO: 12994 - RNA, 20 nt, synthetic construct
  source 1..20: mol_type = other RNA
tcacaaagggagttttccac

SEQ ID NO: 12995 - RNA, 20 nt, synthetic construct
  source 1..20: mol_type = other RNA
tcacactccagttcactgag

SEQ ID NO: 12996 - RNA, 20 nt, synthetic construct
  source 1..20: mol_type = other RNA
tcacagcccgagtttccatg

SEQ ID NO: 12997 - RNA, 20 nt, synthetic construct
  source 1..20: mol_type = other RNA
tcacagggatgcctgtactg

SEQ ID NO: 12998 - RNA, 20 nt, synthetic construct
  source 1..20: mol_type = other RNA
tcacaggtaaaactgacgca

SEQ ID NO: 12999 - RNA, 20 nt, synthetic construct
  source 1..20: mol_type = other RNA
tcaccaagtggttgataaac

SEQ ID NO: 13000 - RNA, 20 nt, synthetic construct
  source 1..20: mol_type = other RNA
tcaccacagccctgccagga

SEQ ID NO: 13001 - RNA, 20 nt, synthetic construct
  source 1..20: mol_type = other RNA
tcaccacccacaggtggcgc

SEQ ID NO: 13002 - RNA, 20 nt, synthetic construct
  source 1..20: mol_type = other RNA
tcaccaggtcgtggccgcct

SEQ ID NO: 13003 - RNA, 20 nt, synthetic construct
  source 1..20: mol_type = other RNA
tcacccagagacagtgacca

SEQ ID NO: 13004 - RNA, 20 nt, synthetic construct
  source 1..20: mol_type = other RNA
tcaccccacacccagacctg

SEQ ID NO: 13005 - RNA, 20 nt, synthetic construct
  source 1..20: mol_type = other RNA
tcaccccacagttggaggag

SEQ ID NO: 13006 - RNA, 20 nt, synthetic construct
  source 1..20: mol_type = other RNA
tcacccctctgggagtcccg

SEQ ID NO: 13007 - RNA, 20 nt, synthetic construct
  source 1..20: mol_type = other RNA
tcacctctccaaagctgccc

SEQ ID NO: 13008 - RNA, 20 nt, synthetic construct
  source 1..20: mol_type = other RNA
tcacctttctagtccccaat

SEQ ID NO: 13009 - RNA, 20 nt, synthetic construct
  source 1..20: mol_type = other RNA
tcactccttcctcagctcca

SEQ ID NO: 13010 - RNA, 20 nt, synthetic construct
  source 1..20: mol_type = other RNA
tcactcttcggggtatccca

SEQ ID NO: 13011 - RNA, 20 nt, synthetic construct
  source 1..20: mol_type = other RNA
tcactgaggccccctctgca

SEQ ID NO: 13012 - RNA, 20 nt, synthetic construct
  source 1..20: mol_type = other RNA
tcactgatcctggtgctgca

SEQ ID NO: 13013 - RNA, 20 nt, synthetic construct
  source 1..20: mol_type = other RNA
tcactgtctctgggtgactc

SEQ ID NO: 13014 - RNA, 20 nt, synthetic construct
  source 1..20: mol_type = other RNA
tcacttcctgtttgcagata

SEQ ID NO: 13015 - RNA, 20 nt, synthetic construct
  source 1..20: mol_type = other RNA
tcagaataagttggtcctga

SEQ ID NO: 13016 - RNA, 20 nt, synthetic construct
  source 1..20: mol_type = other RNA
tcagacccacgagtccaggc

SEQ ID NO: 13017 - RNA, 20 nt, synthetic construct
  source 1..20: mol_type = other RNA
tcagactagggaagaggttc

SEQ ID NO: 13018 - RNA, 20 nt, synthetic construct
  source 1..20: mol_type = other RNA
tcagactgagccccgttccc

SEQ ID NO: 13019 - RNA, 20 nt, synthetic construct
  source 1..20: mol_type = other RNA
tcagagaggagggattccct

SEQ ID NO: 13020 - RNA, 20 nt, synthetic construct
  source 1..20: mol_type = other RNA
tcagagcagctcaggttctg

SEQ ID NO: 13021 - RNA, 20 nt, synthetic construct
  source 1..20: mol_type = other RNA
tcagagccaggagtcctggc

SEQ ID NO: 13022 - RNA, 20 nt, synthetic construct
  source 1..20: mol_type = other RNA
tcagatgaaggagtccaggc

SEQ ID NO: 13023 - RNA, 20 nt, synthetic construct
  source 1..20: mol_type = other RNA
tcagcccctggctgcagggc

SEQ ID NO: 13024 - RNA, 20 nt, synthetic construct
  source 1..20: mol_type = other RNA
tcagccctaagaatcctggc

SEQ ID NO: 13025 - RNA, 20 nt, synthetic construct
  source 1..20: mol_type = other RNA
tcagctccagttcaggtccc

SEQ ID NO: 13026 - RNA, 20 nt, synthetic construct
  source 1..20: mol_type = other RNA
tcaggaccaacttattctga

SEQ ID NO: 13027 - RNA, 20 nt, synthetic construct
  source 1..20: mol_type = other RNA
tcaggcatctttcacaggga

SEQ ID NO: 13028 - RNA, 20 nt, synthetic construct
  source 1..20: mol_type = other RNA
tcaggccggccaggccttca

SEQ ID NO: 13029 - RNA, 20 nt, synthetic construct
  source 1..20: mol_type = other RNA
tcaggcttccctgtccccct

SEQ ID NO: 13030 - RNA, 20 nt, synthetic construct
  source 1..20: mol_type = other RNA
tcaggggcctgggcgggact

SEQ ID NO: 13031 - RNA, 20 nt, synthetic construct
  source 1..20: mol_type = other RNA
tcaggtcccggagcccaccc

SEQ ID NO: 13032 - RNA, 20 nt, synthetic construct
  source 1..20: mol_type = other RNA
tcaggtctgggtgtggggtg

SEQ ID NO: 13033 - RNA, 20 nt, synthetic construct
  source 1..20: mol_type = other RNA
tcaggttacgtggccaagaa

SEQ ID NO: 13034 - RNA, 20 nt, synthetic construct
  source 1..20: mol_type = other RNA
tcaggttctgggagagggta

SEQ ID NO: 13035 - RNA, 20 nt, synthetic construct
  source 1..20: mol_type = other RNA
tcagtcctaggaaaacaggg

SEQ ID NO: 13036 - RNA, 20 nt, synthetic construct
  source 1..20: mol_type = other RNA
tcagtctgaagagcagagcc

SEQ ID NO: 13037 - RNA, 20 nt, synthetic construct
  source 1..20: mol_type = other RNA
tcagtgaaacgcaccagacg

SEQ ID NO: 13038 - RNA, 20 nt, synthetic construct
  source 1..20: mol_type = other RNA
tcagtgaactggagtgtgac

SEQ ID NO: 13039 - RNA, 20 nt, synthetic construct
  source 1..20: mol_type = other RNA
tcagtgctaaaactaggctg

SEQ ID NO: 13040 - RNA, 20 nt, synthetic construct
  source 1..20: mol_type = other RNA
tcagtgctcagtggaaacca

SEQ ID NO: 13041 - RNA, 20 nt, synthetic construct
  source 1..20: mol_type = other RNA
tcagtggaaaccacgaaagg

SEQ ID NO: 13042 - RNA, 20 nt, synthetic construct
  source 1..20: mol_type = other RNA
tcagtggccaccctgcgcta

SEQ ID NO: 13043 - RNA, 20 nt, synthetic construct
  source 1..20: mol_type = other RNA
tcagttttacctgtgagata

SEQ ID NO: 13044 - RNA, 20 nt, synthetic construct
  source 1..20: mol_type = other RNA
tcatcccgttcccagggcac

SEQ ID NO: 13045 - RNA, 20 nt, synthetic construct
  source 1..20: mol_type = other RNA
tcatctgagggcggaagggc

SEQ ID NO: 13046 - RNA, 20 nt, synthetic construct
  source 1..20: mol_type = other RNA
tcatctgggtgcgggaaccc

SEQ ID NO: 13047 - RNA, 20 nt, synthetic construct
  source 1..20: mol_type = other RNA
tcatgcccctggctctcctg

SEQ ID NO: 13048 - RNA, 20 nt, synthetic construct
  source 1..20: mol_type = other RNA
tcatgctcttggccctcgta

SEQ ID NO: 13049 - RNA, 20 nt, synthetic construct
  source 1..20: mol_type = other RNA
tcatggaaactcgggctgtg

SEQ ID NO: 13050 - RNA, 20 nt, synthetic construct
  source 1..20: mol_type = other RNA
tcatggcgataggggagggg

SEQ ID NO: 13051 - RNA, 20 nt, synthetic construct
  source 1..20: mol_type = other RNA
tcattcttcccttaggggtc

SEQ ID NO: 13052 - RNA, 20 nt, synthetic construct
  source 1..20: mol_type = other RNA
tcattttccccactgtccta

SEQ ID NO: 13053 - RNA, 20 nt, synthetic construct
  source 1..20: mol_type = other RNA
tccaaaacttggggggacaa

SEQ ID NO: 13054 - RNA, 20 nt, synthetic construct
  source 1..20: mol_type = other RNA
tccaaactgcttctcctctt

SEQ ID NO: 13055 - RNA, 20 nt, synthetic construct
  source 1..20: mol_type = other RNA
tccaaagctgcccatctgga

SEQ ID NO: 13056 - RNA, 20 nt, synthetic construct
  source 1..20: mol_type = other RNA
tccaactgtggggtgactgc

SEQ ID NO: 13057 - RNA, 20 nt, synthetic construct
  source 1..20: mol_type = other RNA
tccaagggtcaagctcggaa

SEQ ID NO: 13058 - RNA, 20 nt, synthetic construct
  source 1..20: mol_type = other RNA
tccacaaggcctggggcaag

SEQ ID NO: 13059 - RNA, 20 nt, synthetic construct
  source 1..20: mol_type = other RNA
tccacacggacacccccctc

SEQ ID NO: 13060 - RNA, 20 nt, synthetic construct
  source 1..20: mol_type = other RNA
tccaccatctcatgcccctg

SEQ ID NO: 13061 - RNA, 20 nt, synthetic construct
  source 1..20: mol_type = other RNA
tccacccaaaaggcagcctg

SEQ ID NO: 13062 - RNA, 20 nt, synthetic construct
  source 1..20: mol_type = other RNA
tccacccagttgtcatggcg

SEQ ID NO: 13063 - RNA, 20 nt, synthetic construct
  source 1..20: mol_type = other RNA
tccaccctgcatagccctgg

SEQ ID NO: 13064 - RNA, 20 nt, synthetic construct
  source 1..20: mol_type = other RNA
tccacctggggctgtgtttc

SEQ ID NO: 13065 - RNA, 20 nt, synthetic construct
  source 1..20: mol_type = other RNA
tccacgggataaattacccc

SEQ ID NO: 13066 - RNA, 20 nt, synthetic construct
  source 1..20: mol_type = other RNA
tccactgagcactgaaggcc

SEQ ID NO: 13067 - RNA, 20 nt, synthetic construct
  source 1..20: mol_type = other RNA
tccagagggagccacgaaaa

SEQ ID NO: 13068 - RNA, 20 nt, synthetic construct
  source 1..20: mol_type = other RNA
tccagagtccaggcccaacc

SEQ ID NO: 13069 - RNA, 20 nt, synthetic construct
  source 1..20: mol_type = other RNA
tccagatgggcagctttgga

SEQ ID NO: 13070 - RNA, 20 nt, synthetic construct
  source 1..20: mol_type = other RNA
tccagcccctcctactctag

SEQ ID NO: 13071 - RNA, 20 nt, synthetic construct
  source 1..20: mol_type = other RNA
tccagcccctcctccttcag

SEQ ID NO: 13072 - RNA, 20 nt, synthetic construct
  source 1..20: mol_type = other RNA
tccaggcaggtccccaagca

SEQ ID NO: 13073 - RNA, 20 nt, synthetic construct
  source 1..20: mol_type = other RNA
tccaggccaagtaggtggcc

SEQ ID NO: 13074 - RNA, 20 nt, synthetic construct
  source 1..20: mol_type = other RNA
tccaggcccaacccctcccc

SEQ ID NO: 13075 - RNA, 20 nt, synthetic construct
  source 1..20: mol_type = other RNA
tccaggcccagccccgcctc

SEQ ID NO: 13076 - RNA, 20 nt, synthetic construct
  source 1..20: mol_type = other RNA
tccaggccccagcccctcct

SEQ ID NO: 13077 - RNA, 20 nt, synthetic construct
  source 1..20: mol_type = other RNA
tccaggcccccagcctctcc

SEQ ID NO: 13078 - RNA, 20 nt, synthetic construct
  source 1..20: mol_type = other RNA
tccaggcccccagtccctcc

SEQ ID NO: 13079 - RNA, 20 nt, synthetic construct
  source 1..20: mol_type = other RNA
tccaggcctcctgggatacc

SEQ ID NO: 13080 - RNA, 20 nt, synthetic construct
  source 1..20: mol_type = other RNA
tccagggacacggtgctagg

SEQ ID NO: 13081 - RNA, 20 nt, synthetic construct
  source 1..20: mol_type = other RNA
tccagggggtcggaggaggg

SEQ ID NO: 13082 - RNA, 20 nt, synthetic construct
  source 1..20: mol_type = other RNA
tccagtgctcagactaggga

SEQ ID NO: 13083 - RNA, 20 nt, synthetic construct
  source 1..20: mol_type = other RNA
tccagttcactgaggccccc

SEQ ID NO: 13084 - RNA, 20 nt, synthetic construct
  source 1..20: mol_type = other RNA
tccagttcaggtcccggagc

SEQ ID NO: 13085 - RNA, 20 nt, synthetic construct
  source 1..20: mol_type = other RNA
tccatccttctttccttaaa

SEQ ID NO: 13086 - RNA, 20 nt, synthetic construct
  source 1..20: mol_type = other RNA
tccatgacctcatgctcttg

SEQ ID NO: 13087 - RNA, 20 nt, synthetic construct
  source 1..20: mol_type = other RNA
tcccaagaggagaagcagtt

SEQ ID NO: 13088 - RNA, 20 nt, synthetic construct
  source 1..20: mol_type = other RNA
tcccaagttcttagggtacc

SEQ ID NO: 13089 - RNA, 20 nt, synthetic construct
  source 1..20: mol_type = other RNA
tcccagaacctgagctgctc

SEQ ID NO: 13090 - RNA, 20 nt, synthetic construct
  source 1..20: mol_type = other RNA
tcccagaggggtgagacagc

SEQ ID NO: 13091 - RNA, 20 nt, synthetic construct
  source 1..20: mol_type = other RNA
tcccagatagcactggggac

SEQ ID NO: 13092 - RNA, 20 nt, synthetic construct
  source 1..20: mol_type = other RNA
tcccagcaagtcgggactcc

SEQ ID NO: 13093 - RNA, 20 nt, synthetic construct
  source 1..20: mol_type = other RNA
tcccagcacagggtggcctt

SEQ ID NO: 13094 - RNA, 20 nt, synthetic construct
  source 1..20: mol_type = other RNA
tcccaggaggcctggagcat

SEQ ID NO: 13095 - RNA, 20 nt, synthetic construct
  source 1..20: mol_type = other RNA
tcccagggcacgtgcggccc

SEQ ID NO: 13096 - RNA, 20 nt, synthetic construct
  source 1..20: mol_type = other RNA
tccccaagcatcgcccccct

SEQ ID NO: 13097 - RNA, 20 nt, synthetic construct
  source 1..20: mol_type = other RNA
tccccaatttatattgttcc

SEQ ID NO: 13098 - RNA, 20 nt, synthetic construct
  source 1..20: mol_type = other RNA
tccccactgtcctagcaccg

SEQ ID NO: 13099 - RNA, 20 nt, synthetic construct
  source 1..20: mol_type = other RNA
tccccagtgctatctgggac

SEQ ID NO: 13100 - RNA, 20 nt, synthetic construct
  source 1..20: mol_type = other RNA
tccccattcaacccaggagg

SEQ ID NO: 13101 - RNA, 20 nt, synthetic construct
  source 1..20: mol_type = other RNA
tccccattcagacccagggg

SEQ ID NO: 13102 - RNA, 20 nt, synthetic construct
  source 1..20: mol_type = other RNA
tcccccagaggccccaggcc

SEQ ID NO: 13103 - RNA, 20 nt, synthetic construct
  source 1..20: mol_type = other RNA
tccccccaagttttggaccc

SEQ ID NO: 13104 - RNA, 20 nt, synthetic construct
  source 1..20: mol_type = other RNA
tcccccttcccctgcatccc

SEQ ID NO: 13105 - RNA, 20 nt, synthetic construct
  source 1..20: mol_type = other RNA
tcccccttcctcgtccacca

SEQ ID NO: 13106 - RNA, 20 nt, synthetic construct
  source 1..20: mol_type = other RNA
tccccgttcacttcctgttt

SEQ ID NO: 13107 - RNA, 20 nt, synthetic construct
  source 1..20: mol_type = other RNA
tccccgttcccctgcatccc

SEQ ID NO: 13108 - RNA, 20 nt, synthetic construct
  source 1..20: mol_type = other RNA
tcccctatcgccatgacaac

SEQ ID NO: 13109 - RNA, 20 nt, synthetic construct
  source 1..20: mol_type = other RNA
tcccctgcatcccccagagg

SEQ ID NO: 13110 - RNA, 20 nt, synthetic construct
  source 1..20: mol_type = other RNA
tcccctgcatcccccttccc

SEQ ID NO: 13111 - RNA, 20 nt, synthetic construct
  source 1..20: mol_type = other RNA
tcccctgcatccccgttccc

SEQ ID NO: 13112 - RNA, 20 nt, synthetic construct
  source 1..20: mol_type = other RNA
tcccctgcttcttggccacg

SEQ ID NO: 13113 - RNA, 20 nt, synthetic construct
  source 1..20: mol_type = other RNA
tcccgcacccagatgagaag

SEQ ID NO: 13114 - RNA, 20 nt, synthetic construct
  source 1..20: mol_type = other RNA
tcccgcccaggcccctgagt

SEQ ID NO: 13115 - RNA, 20 nt, synthetic construct
  source 1..20: mol_type = other RNA
tcccgcctcctccagatggg

SEQ ID NO: 13116 - RNA, 20 nt, synthetic construct
  source 1..20: mol_type = other RNA
tcccgcttccctaaggccct

SEQ ID NO: 13117 - RNA, 20 nt, synthetic construct
  source 1..20: mol_type = other RNA
tcccggagcccacccagtgt

SEQ ID NO: 13118 - RNA, 20 nt, synthetic construct
  source 1..20: mol_type = other RNA
tcccggccagtttctccacc

SEQ ID NO: 13119 - RNA, 20 nt, synthetic construct
  source 1..20: mol_type = other RNA
tcccgtggatctaggagttt

SEQ ID NO: 13120 - RNA, 20 nt, synthetic construct
  source 1..20: mol_type = other RNA
tcccgttcccagggcacgtg

SEQ ID NO: 13121 - RNA, 20 nt, synthetic construct
  source 1..20: mol_type = other RNA
tccctaagacccagaagtcc

SEQ ID NO: 13122 - RNA, 20 nt, synthetic construct
  source 1..20: mol_type = other RNA
tccctaaggccctgctctgg

SEQ ID NO: 13123 - RNA, 20 nt, synthetic construct
  source 1..20: mol_type = other RNA
tccctacaggggttcctggc

SEQ ID NO: 13124 - RNA, 20 nt, synthetic construct
  source 1..20: mol_type = other RNA
tccctagtctgagcactgga

SEQ ID NO: 13125 - RNA, 20 nt, synthetic construct
  source 1..20: mol_type = other RNA
tccctcacctctccaaagct

SEQ ID NO: 13126 - RNA, 20 nt, synthetic construct
  source 1..20: mol_type = other RNA
tccctccaccctcagaccca

SEQ ID NO: 13127 - RNA, 20 nt, synthetic construct
  source 1..20: mol_type = other RNA
tccctcccgcctcctccaga

SEQ ID NO: 13128 - RNA, 20 nt, synthetic construct
  source 1..20: mol_type = other RNA
tccctcctccgaccccctgg

SEQ ID NO: 13129 - RNA, 20 nt, synthetic construct
  source 1..20: mol_type = other RNA
tccctcctctctgaacccca

SEQ ID NO: 13130 - RNA, 20 nt, synthetic construct
  source 1..20: mol_type = other RNA
tccctcggacccaggagtcc

SEQ ID NO: 13131 - RNA, 20 nt, synthetic construct
  source 1..20: mol_type = other RNA
tccctctggagtcccgactt

SEQ ID NO: 13132 - RNA, 20 nt, synthetic construct
  source 1..20: mol_type = other RNA
tccctggatctgttttcgtg

SEQ ID NO: 13133 - RNA, 20 nt, synthetic construct
  source 1..20: mol_type = other RNA
tccctggtgcccaggcctca

SEQ ID NO: 13134 - RNA, 20 nt, synthetic construct
  source 1..20: mol_type = other RNA
tccctgtcccccttcctcgt

SEQ ID NO: 13135 - RNA, 20 nt, synthetic construct
  source 1..20: mol_type = other RNA
tccctgtgaaagatgcctga

SEQ ID NO: 13136 - RNA, 20 nt, synthetic construct
  source 1..20: mol_type = other RNA
tccctgttttcctaggactg

SEQ ID NO: 13137 - RNA, 20 nt, synthetic construct
  source 1..20: mol_type = other RNA
tcccttaggggtccaaaact

SEQ ID NO: 13138 - RNA, 20 nt, synthetic construct
  source 1..20: mol_type = other RNA
tcccttccccgttcacttcc

SEQ ID NO: 13139 - RNA, 20 nt, synthetic construct
  source 1..20: mol_type = other RNA
tcccttctcaggttacgtgg

SEQ ID NO: 13140 - RNA, 20 nt, synthetic construct
  source 1..20: mol_type = other RNA
tccctttcaaggacctgccc

SEQ ID NO: 13141 - RNA, 20 nt, synthetic construct
  source 1..20: mol_type = other RNA
tccctttctctttctccatc

SEQ ID NO: 13142 - RNA, 20 nt, synthetic construct
  source 1..20: mol_type = other RNA
tccctttgtgagaatggtgc

SEQ ID NO: 13143 - RNA, 20 nt, synthetic construct
  source 1..20: mol_type = other RNA
tccgaccccctggacttcgg

SEQ ID NO: 13144 - RNA, 20 nt, synthetic construct
  source 1..20: mol_type = other RNA
tccgagcttgacccttggaa

SEQ ID NO: 13145 - RNA, 20 nt, synthetic construct
  source 1..20: mol_type = other RNA
tccgcccagagcagggtccc

SEQ ID NO: 13146 - RNA, 20 nt, synthetic construct
  source 1..20: mol_type = other RNA
tccgccctcagatgaaggag

SEQ ID NO: 13147 - RNA, 20 nt, synthetic construct
  source 1..20: mol_type = other RNA
tccgggacctgaactggagc

SEQ ID NO: 13148 - RNA, 20 nt, synthetic construct
  source 1..20: mol_type = other RNA
tccgtgcgtcagttttacct

SEQ ID NO: 13149 - RNA, 20 nt, synthetic construct
  source 1..20: mol_type = other RNA
tccgtgtggaaaactccctt

SEQ ID NO: 13150 - RNA, 20 nt, synthetic construct
  source 1..20: mol_type = other RNA
tcctactctagcccccaacc

SEQ ID NO: 13151 - RNA, 20 nt, synthetic construct
  source 1..20: mol_type = other RNA
tcctagatccacgggataaa

SEQ ID NO: 13152 - RNA, 20 nt, synthetic construct
  source 1..20: mol_type = other RNA
tcctagcaccgtgtccctgg

SEQ ID NO: 13153 - RNA, 20 nt, synthetic construct
  source 1..20: mol_type = other RNA
tcctaggaaaacagggatgg

SEQ ID NO: 13154 - RNA, 20 nt, synthetic construct
  source 1..20: mol_type = other RNA
tcctaggactgagggtttca

SEQ ID NO: 13155 - RNA, 20 nt, synthetic construct
  source 1..20: mol_type = other RNA
tcctaggtgttcaccaggtc

SEQ ID NO: 13156 - RNA, 20 nt, synthetic construct
  source 1..20: mol_type = other RNA
tcctcaccacagccctgcca

SEQ ID NO: 13157 - RNA, 20 nt, synthetic construct
  source 1..20: mol_type = other RNA
tcctcagctccagttcaggt

SEQ ID NO: 13158 - RNA, 20 nt, synthetic construct
  source 1..20: mol_type = other RNA
tcctccaactgtggggtgac

SEQ ID NO: 13159 - RNA, 20 nt, synthetic construct
  source 1..20: mol_type = other RNA
tcctccaccctgcatagccc

SEQ ID NO: 13160 - RNA, 20 nt, synthetic construct
  source 1..20: mol_type = other RNA
tcctccagatgggcagcttt

SEQ ID NO: 13161 - RNA, 20 nt, synthetic construct
  source 1..20: mol_type = other RNA
tcctccgaccccctggactt

SEQ ID NO: 13162 - RNA, 20 nt, synthetic construct
  source 1..20: mol_type = other RNA
tcctccgcccagagcagggt

SEQ ID NO: 13163 - RNA, 20 nt, synthetic construct
  source 1..20: mol_type = other RNA
tcctccgtgcgtcagtttta

SEQ ID NO: 13164 - RNA, 20 nt, synthetic construct
  source 1..20: mol_type = other RNA
tcctccttcagagccaggag

SEQ ID NO: 13165 - RNA, 20 nt, synthetic construct
  source 1..20: mol_type = other RNA
tcctcgtccaccatctcatg

SEQ ID NO: 13166 - RNA, 20 nt, synthetic construct
  source 1..20: mol_type = other RNA
tcctctctcaaacccaggag

SEQ ID NO: 13167 - RNA, 20 nt, synthetic construct
  source 1..20: mol_type = other RNA
tcctctctgaaccccagccc

SEQ ID NO: 13168 - RNA, 20 nt, synthetic construct
  source 1..20: mol_type = other RNA
tcctcttgggaagtgtaagg

SEQ ID NO: 13169 - RNA, 20 nt, synthetic construct
  source 1..20: mol_type = other RNA
tcctgagttctaactttggc

SEQ ID NO: 13170 - RNA, 20 nt, synthetic construct
  source 1..20: mol_type = other RNA
tcctgcaccccaattgcctt

SEQ ID NO: 13171 - RNA, 20 nt, synthetic construct
  source 1..20: mol_type = other RNA
tcctgcagagtatctgctgg

SEQ ID NO: 13172 - RNA, 20 nt, synthetic construct
  source 1..20: mol_type = other RNA
tcctgcatccttctccaggc

SEQ ID NO: 13173 - RNA, 20 nt, synthetic construct
  source 1..20: mol_type = other RNA
tcctgccccttccctacagg

SEQ ID NO: 13174 - RNA, 20 nt, synthetic construct
  source 1..20: mol_type = other RNA
tcctgccttaaacccagcca

SEQ ID NO: 13175 - RNA, 20 nt, synthetic construct
  source 1..20: mol_type = other RNA
tcctggcagggctgtggtga

SEQ ID NO: 13176 - RNA, 20 nt, synthetic construct
  source 1..20: mol_type = other RNA
tcctggcccccagcccctcc

SEQ ID NO: 13177 - RNA, 20 nt, synthetic construct
  source 1..20: mol_type = other RNA
tcctggctatctgcaaacag

SEQ ID NO: 13178 - RNA, 20 nt, synthetic construct
  source 1..20: mol_type = other RNA
tcctggctccagcccctcct

SEQ ID NO: 13179 - RNA, 20 nt, synthetic construct
  source 1..20: mol_type = other RNA
tcctggctctgaaggaggag

SEQ ID NO: 13180 - RNA, 20 nt, synthetic construct
  source 1..20: mol_type = other RNA
tcctggctctgctcttcaga

SEQ ID NO: 13181 - RNA, 20 nt, synthetic construct
  source 1..20: mol_type = other RNA
tcctgggataccccgaagag

SEQ ID NO: 13182 - RNA, 20 nt, synthetic construct
  source 1..20: mol_type = other RNA
tcctgggcaaacagcataag

SEQ ID NO: 13183 - RNA, 20 nt, synthetic construct
  source 1..20: mol_type = other RNA
tcctgggcttgccaaggact

SEQ ID NO: 13184 - RNA, 20 nt, synthetic construct
  source 1..20: mol_type = other RNA
tcctgggtctgagggtggag

SEQ ID NO: 13185 - RNA, 20 nt, synthetic construct
  source 1..20: mol_type = other RNA
tcctgggttgaatggggagg

SEQ ID NO: 13186 - RNA, 20 nt, synthetic construct
  source 1..20: mol_type = other RNA
tcctgggtttgagagaggag

SEQ ID NO: 13187 - RNA, 20 nt, synthetic construct
  source 1..20: mol_type = other RNA
tcctggtgctgcagcttcct

SEQ ID NO: 13188 - RNA, 20 nt, synthetic construct
  source 1..20: mol_type = other RNA
tcctgtttgcagatagccag

SEQ ID NO: 13189 - RNA, 20 nt, synthetic construct
  source 1..20: mol_type = other RNA
tccttaaagagtccccagtg

SEQ ID NO: 13190 - RNA, 20 nt, synthetic construct
  source 1..20: mol_type = other RNA
tccttacacttcccaagagg

SEQ ID NO: 13191 - RNA, 20 nt, synthetic construct
  source 1..20: mol_type = other RNA
tccttcagagccaggagtcc

SEQ ID NO: 13192 - RNA, 20 nt, synthetic construct
  source 1..20: mol_type = other RNA
tccttcatctgagggcggaa

SEQ ID NO: 13193 - RNA, 20 nt, synthetic construct
  source 1..20: mol_type = other RNA
tccttccaagggtcaagctc

SEQ ID NO: 13194 - RNA, 20 nt, synthetic construct
  source 1..20: mol_type = other RNA
tccttcctcagctccagttc

SEQ ID NO: 13195 - RNA, 20 nt, synthetic construct
  source 1..20: mol_type = other RNA
tccttctccaggcaggtccc

SEQ ID NO: 13196 - RNA, 20 nt, synthetic construct
  source 1..20: mol_type = other RNA
tccttctttccttaaagagt

SEQ ID NO: 13197 - RNA, 20 nt, synthetic construct
  source 1..20: mol_type = other RNA
tccttgaaagggaaaggccc

SEQ ID NO: 13198 - RNA, 20 nt, synthetic construct
  source 1..20: mol_type = other RNA
tccttgcccccctcccctat

SEQ ID NO: 13199 - RNA, 20 nt, synthetic construct
  source 1..20: mol_type = other RNA
tccttggcaagcccaggaga

SEQ ID NO: 13200 - RNA, 20 nt, synthetic construct
  source 1..20: mol_type = other RNA
tcctttcgtggtttccactg

SEQ ID NO: 13201 - RNA, 20 nt, synthetic construct
  source 1..20: mol_type = other RNA
tcgccatgacaactgggtgg

SEQ ID NO: 13202 - RNA, 20 nt, synthetic construct
  source 1..20: mol_type = other RNA
tcgcccccctgctgtggctg

SEQ ID NO: 13203 - RNA, 20 nt, synthetic construct
  source 1..20: mol_type = other RNA
tcggaaaccaccccagcaga

SEQ ID NO: 13204 - RNA, 20 nt, synthetic construct
  source 1..20: mol_type = other RNA
tcggacccaggagtccaggc

SEQ ID NO: 13205 - RNA, 20 nt, synthetic construct
  source 1..20: mol_type = other RNA
tcggaggagggacttgcccc

SEQ ID NO: 13206 - RNA, 20 nt, synthetic construct
  source 1..20: mol_type = other RNA
tcggctcgtttatttccacc

SEQ ID NO: 13207 - RNA, 20 nt, synthetic construct
  source 1..20: mol_type = other RNA
tcggcttttgtccccccaag

SEQ ID NO: 13208 - RNA, 20 nt, synthetic construct
  source 1..20: mol_type = other RNA
tcgggactccagagggagcc

SEQ ID NO: 13209 - RNA, 20 nt, synthetic construct
  source 1..20: mol_type = other RNA
tcgggctgtgaaggggccgc

SEQ ID NO: 13210 - RNA, 20 nt, synthetic construct
  source 1..20: mol_type = other RNA
tcggggtatcccaggaggcc

SEQ ID NO: 13211 - RNA, 20 nt, synthetic construct
  source 1..20: mol_type = other RNA
tcgtagctccctcccgcctc

SEQ ID NO: 13212 - RNA, 20 nt, synthetic construct
  source 1..20: mol_type = other RNA
tcgtccaccatctcatgccc

SEQ ID NO: 13213 - RNA, 20 nt, synthetic construct
  source 1..20: mol_type = other RNA
tcgtcctgcatccttctcca

SEQ ID NO: 13214 - RNA, 20 nt, synthetic construct
  source 1..20: mol_type = other RNA
tcgtggccgcctctactccc

SEQ ID NO: 13215 - RNA, 20 nt, synthetic construct
  source 1..20: mol_type = other RNA
tcgtggctccctctggagtc

SEQ ID NO: 13216 - RNA, 20 nt, synthetic construct
  source 1..20: mol_type = other RNA
tcgtggggtccaggccaagt

SEQ ID NO: 13217 - RNA, 20 nt, synthetic construct
  source 1..20: mol_type = other RNA
tcgtgggtctgagggaggag

SEQ ID NO: 13218 - RNA, 20 nt, synthetic construct
  source 1..20: mol_type = other RNA
tcgtggtttccactgagcac

SEQ ID NO: 13219 - RNA, 20 nt, synthetic construct
  source 1..20: mol_type = other RNA
tcgttcctgcagagtatctg

SEQ ID NO: 13220 - RNA, 20 nt, synthetic construct
  source 1..20: mol_type = other RNA
tcgtttatttccacccagtt

SEQ ID NO: 13221 - RNA, 20 nt, synthetic construct
  source 1..20: mol_type = other RNA
tctaacaggtaccatgtggg

SEQ ID NO: 13222 - RNA, 20 nt, synthetic construct
  source 1..20: mol_type = other RNA
tctaactttggctcttcacc

SEQ ID NO: 13223 - RNA, 20 nt, synthetic construct
  source 1..20: mol_type = other RNA
tctaccaggctgccttttgg

SEQ ID NO: 13224 - RNA, 20 nt, synthetic construct
  source 1..20: mol_type = other RNA
tctactccctttctctttct

SEQ ID NO: 13225 - RNA, 20 nt, synthetic construct
  source 1..20: mol_type = other RNA
tctagcccccaaccccctag

SEQ ID NO: 13226 - RNA, 20 nt, synthetic construct
  source 1..20: mol_type = other RNA
tctaggagtttagcttcact

SEQ ID NO: 13227 - RNA, 20 nt, synthetic construct
  source 1..20: mol_type = other RNA
tctagtccccaatttatatt

SEQ ID NO: 13228 - RNA, 20 nt, synthetic construct
  source 1..20: mol_type = other RNA
tctcaaacccaggagcccag

SEQ ID NO: 13229 - RNA, 20 nt, synthetic construct
  source 1..20: mol_type = other RNA
tctcacaaagggagttttcc

SEQ ID NO: 13230 - RNA, 20 nt, synthetic construct
  source 1..20: mol_type = other RNA
tctcacaggtaaaactgacg

SEQ ID NO: 13231 - RNA, 20 nt, synthetic construct
  source 1..20: mol_type = other RNA
tctcacccctctgggagtcc

SEQ ID NO: 13232 - RNA, 20 nt, synthetic construct
  source 1..20: mol_type = other RNA
tctcaggttacgtggccaag

SEQ ID NO: 13233 - RNA, 20 nt, synthetic construct
  source 1..20: mol_type = other RNA
tctcagtggccaccctgcgc

SEQ ID NO: 13234 - RNA, 20 nt, synthetic construct
  source 1..20: mol_type = other RNA
tctcatctgggtgcgggaac

SEQ ID NO: 13235 - RNA, 20 nt, synthetic construct
  source 1..20: mol_type = other RNA
tctcatgcccctggctctcc

SEQ ID NO: 13236 - RNA, 20 nt, synthetic construct
  source 1..20: mol_type = other RNA
tctcattcttcccttagggg

SEQ ID NO: 13237 - RNA, 20 nt, synthetic construct
  source 1..20: mol_type = other RNA
tctccaaagctgcccatctg

SEQ ID NO: 13238 - RNA, 20 nt, synthetic construct
  source 1..20: mol_type = other RNA
tctccacctggggctgtgtt

SEQ ID NO: 13239 - RNA, 20 nt, synthetic construct
  source 1..20: mol_type = other RNA
tctccaggcaggtccccaag

SEQ ID NO: 13240 - RNA, 20 nt, synthetic construct
  source 1..20: mol_type = other RNA
tctccatccttctttcctta

SEQ ID NO: 13241 - RNA, 20 nt, synthetic construct
  source 1..20: mol_type = other RNA
tctcccagaacctgagctgc

SEQ ID NO: 13242 - RNA, 20 nt, synthetic construct
  source 1..20: mol_type = other RNA
tctccccattcagacccagg

SEQ ID NO: 13243 - RNA, 20 nt, synthetic construct
  source 1..20: mol_type = other RNA
tctcctccaactgtggggtg

SEQ ID NO: 13244 - RNA, 20 nt, synthetic construct
  source 1..20: mol_type = other RNA
tctcctcttgggaagtgtaa

SEQ ID NO: 13245 - RNA, 20 nt, synthetic construct
  source 1..20: mol_type = other RNA
tctcctgccccttccctaca

SEQ ID NO: 13246 - RNA, 20 nt, synthetic construct
  source 1..20: mol_type = other RNA
tctcctgggcttgccaagga

SEQ ID NO: 13247 - RNA, 20 nt, synthetic construct
  source 1..20: mol_type = other RNA
tctccttgcccccctcccct

SEQ ID NO: 13248 - RNA, 20 nt, synthetic construct
  source 1..20: mol_type = other RNA
tctcgtcctgcatccttctc

SEQ ID NO: 13249 - RNA, 20 nt, synthetic construct
  source 1..20: mol_type = other RNA
tctcgtggggtccaggccaa

SEQ ID NO: 13250 - RNA, 20 nt, synthetic construct
  source 1..20: mol_type = other RNA
tctctcaaacccaggagccc

SEQ ID NO: 13251 - RNA, 20 nt, synthetic construct
  source 1..20: mol_type = other RNA
tctctgaaccccagcccacc

SEQ ID NO: 13252 - RNA, 20 nt, synthetic construct
  source 1..20: mol_type = other RNA
tctctgggtgactcttgatt

SEQ ID NO: 13253 - RNA, 20 nt, synthetic construct
  source 1..20: mol_type = other RNA
tctctgttcagccctaagaa

SEQ ID NO: 13254 - RNA, 20 nt, synthetic construct
  source 1..20: mol_type = other RNA
tctctttctccatccttctt

SEQ ID NO: 13255 - RNA, 20 nt, synthetic construct
  source 1..20: mol_type = other RNA
tctgaaccccagcccacccc

SEQ ID NO: 13256 - RNA, 20 nt, synthetic construct
  source 1..20: mol_type = other RNA
tctgaagagcagagccagga

SEQ ID NO: 13257 - RNA, 20 nt, synthetic construct
  source 1..20: mol_type = other RNA
tctgaaggaggaggggctgg

SEQ ID NO: 13258 - RNA, 20 nt, synthetic construct
  source 1..20: mol_type = other RNA
tctgaatggggagaggctgg

SEQ ID NO: 13259 - RNA, 20 nt, synthetic construct
  source 1..20: mol_type = other RNA
tctgacgcggccgtctggtg

SEQ ID NO: 13260 - RNA, 20 nt, synthetic construct
  source 1..20: mol_type = other RNA
tctgagcactggaagcgcca

SEQ ID NO: 13261 - RNA, 20 nt, synthetic construct
  source 1..20: mol_type = other RNA
tctgagggcggaagggctgg

SEQ ID NO: 13262 - RNA, 20 nt, synthetic construct
  source 1..20: mol_type = other RNA
tctgagggtggagggactgg

SEQ ID NO: 13263 - RNA, 20 nt, synthetic construct
  source 1..20: mol_type = other RNA
tctgattttgtttttccaaa

SEQ ID NO: 13264 - RNA, 20 nt, synthetic construct
  source 1..20: mol_type = other RNA
tctgcaaacaggaagtgaac

SEQ ID NO: 13265 - RNA, 20 nt, synthetic construct
  source 1..20: mol_type = other RNA
tctgcacggggccctgcagc

SEQ ID NO: 13266 - RNA, 20 nt, synthetic construct
  source 1..20: mol_type = other RNA
tctgcaggaacgaagccgtg

SEQ ID NO: 13267 - RNA, 20 nt, synthetic construct
  source 1..20: mol_type = other RNA
tctgctcttcagactgagcc

SEQ ID NO: 13268 - RNA, 20 nt, synthetic construct
  source 1..20: mol_type = other RNA
tctgctggggtggtttccga

SEQ ID NO: 13269 - RNA, 20 nt, synthetic construct
  source 1..20: mol_type = other RNA
tctggaggaggcgggaggga

SEQ ID NO: 13270 - RNA, 20 nt, synthetic construct
  source 1..20: mol_type = other RNA
tctggagtcccgacttgctg

SEQ ID NO: 13271 - RNA, 20 nt, synthetic construct
  source 1..20: mol_type = other RNA
tctggagtccctggtgccca

SEQ ID NO: 13272 - RNA, 20 nt, synthetic construct
  source 1..20: mol_type = other RNA
tctggccactggctgtttaa

SEQ ID NO: 13273 - RNA, 20 nt, synthetic construct
  source 1..20: mol_type = other RNA
tctgggacatattcctccgc

SEQ ID NO: 13274 - RNA, 20 nt, synthetic construct
  source 1..20: mol_type = other RNA
tctgggagagggtagcgcag

SEQ ID NO: 13275 - RNA, 20 nt, synthetic construct
  source 1..20: mol_type = other RNA
tctgggagtcccgcccaggc

SEQ ID NO: 13276 - RNA, 20 nt, synthetic construct
  source 1..20: mol_type = other RNA
tctgggcggaggaatatgtc

SEQ ID NO: 13277 - RNA, 20 nt, synthetic construct
  source 1..20: mol_type = other RNA
tctgggcttctgggtttgag

SEQ ID NO: 13278 - RNA, 20 nt, synthetic construct
  source 1..20: mol_type = other RNA
tctgggggatgcaggggaag

SEQ ID NO: 13279 - RNA, 20 nt, synthetic construct
  source 1..20: mol_type = other RNA
tctgggtcttagggaggcgg

SEQ ID NO: 13280 - RNA, 20 nt, synthetic construct
  source 1..20: mol_type = other RNA
tctgggtgactcttgattcc

SEQ ID NO: 13281 - RNA, 20 nt, synthetic construct
  source 1..20: mol_type = other RNA
tctgggtgcgggaaccccac

SEQ ID NO: 13282 - RNA, 20 nt, synthetic construct
  source 1..20: mol_type = other RNA
tctgggtgtggggtgaccag

SEQ ID NO: 13283 - RNA, 20 nt, synthetic construct
  source 1..20: mol_type = other RNA
tctgggtttgagtccttggc

SEQ ID NO: 13284 - RNA, 20 nt, synthetic construct
  source 1..20: mol_type = other RNA
tctggtgcgtttcactgatc

SEQ ID NO: 13285 - RNA, 20 nt, synthetic construct
  source 1..20: mol_type = other RNA
tctgtcccagcacagggtgg

SEQ ID NO: 13286 - RNA, 20 nt, synthetic construct
  source 1..20: mol_type = other RNA
tctgttcagccctaagaatc

SEQ ID NO: 13287 - RNA, 20 nt, synthetic construct
  source 1..20: mol_type = other RNA
tctgttttcgtggctccctc

SEQ ID NO: 13288 - RNA, 20 nt, synthetic construct
  source 1..20: mol_type = other RNA
tcttaaacagccagtggcca

SEQ ID NO: 13289 - RNA, 20 nt, synthetic construct
  source 1..20: mol_type = other RNA
tcttagggaggcggggctgg

SEQ ID NO: 13290 - RNA, 20 nt, synthetic construct
  source 1..20: mol_type = other RNA
tcttagggctgaacagagaa

SEQ ID NO: 13291 - RNA, 20 nt, synthetic construct
  source 1..20: mol_type = other RNA
tcttagggtaccccacgtgg

SEQ ID NO: 13292 - RNA, 20 nt, synthetic construct
  source 1..20: mol_type = other RNA
tcttcacctttctagtcccc

SEQ ID NO: 13293 - RNA, 20 nt, synthetic construct
  source 1..20: mol_type = other RNA
tcttcagactgagccccgtt

SEQ ID NO: 13294 - RNA, 20 nt, synthetic construct
  source 1..20: mol_type = other RNA
tcttccctagtctgagcact

SEQ ID NO: 13295 - RNA, 20 nt, synthetic construct
  source 1..20: mol_type = other RNA
tcttcccttaggggtccaaa

SEQ ID NO: 13296 - RNA, 20 nt, synthetic construct
  source 1..20: mol_type = other RNA
tcttcggggtatcccaggag

SEQ ID NO: 13297 - RNA, 20 nt, synthetic construct
  source 1..20: mol_type = other RNA
tcttctctgttcagccctaa

SEQ ID NO: 13298 - RNA, 20 nt, synthetic construct
  source 1..20: mol_type = other RNA
tcttgattcccggccagttt

SEQ ID NO: 13299 - RNA, 20 nt, synthetic construct
  source 1..20: mol_type = other RNA
tcttggccacgtaacctgag

SEQ ID NO: 13300 - RNA, 20 nt, synthetic construct
  source 1..20: mol_type = other RNA
tcttggccctcgtagctccc

SEQ ID NO: 13301 - RNA, 20 nt, synthetic construct
  source 1..20: mol_type = other RNA
tcttgggaagtgtaaggaag

SEQ ID NO: 13302 - RNA, 20 nt, synthetic construct
  source 1..20: mol_type = other RNA
tctttaaggaaagaaggatg

SEQ ID NO: 13303 - RNA, 20 nt, synthetic construct
  source 1..20: mol_type = other RNA
tctttcacagggatgcctgt

SEQ ID NO: 13304 - RNA, 20 nt, synthetic construct
  source 1..20: mol_type = other RNA
tctttccttaaagagtcccc

SEQ ID NO: 13305 - RNA, 20 nt, synthetic construct
  source 1..20: mol_type = other RNA
tctttctccatccttctttc

SEQ ID NO: 13306 - RNA, 20 nt, synthetic construct
  source 1..20: mol_type = other RNA
tgaaaccctcagtcctagga

SEQ ID NO: 13307 - RNA, 20 nt, synthetic construct
  source 1..20: mol_type = other RNA
tgaaacgcaccagacggccg

SEQ ID NO: 13308 - RNA, 20 nt, synthetic construct
  source 1..20: mol_type = other RNA
tgaaagatgcctgaggcctg

SEQ ID NO: 13309 - RNA, 20 nt, synthetic construct
  source 1..20: mol_type = other RNA
tgaaagggaaaggcccattg

SEQ ID NO: 13310 - RNA, 20 nt, synthetic construct
  source 1..20: mol_type = other RNA
tgaacacctaggacgcacca

SEQ ID NO: 13311 - RNA, 20 nt, synthetic construct
  source 1..20: mol_type = other RNA
tgaacagagaagagctgggg

SEQ ID NO: 13312 - RNA, 20 nt, synthetic construct
  source 1..20: mol_type = other RNA
tgaaccccagcccaccccaa

SEQ ID NO: 13313 - RNA, 20 nt, synthetic construct
  source 1..20: mol_type = other RNA
tgaacggggaagggaggggg

SEQ ID NO: 13314 - RNA, 20 nt, synthetic construct
  source 1..20: mol_type = other RNA
tgaactcggctcgtttattt

SEQ ID NO: 13315 - RNA, 20 nt, synthetic construct
  source 1..20: mol_type = other RNA
tgaactggagctgaggaagg

SEQ ID NO: 13316 - RNA, 20 nt, synthetic construct
  source 1..20: mol_type = other RNA
tgaactggagtgtgacagcc

SEQ ID NO: 13317 - RNA, 20 nt, synthetic construct
  source 1..20: mol_type = other RNA
tgaagagcagagccaggaac

SEQ ID NO: 13318 - RNA, 20 nt, synthetic construct
  source 1..20: mol_type = other RNA
tgaagagccaaagttagaac

SEQ ID NO: 13319 - RNA, 20 nt, synthetic construct
  source 1..20: mol_type = other RNA
tgaagctaaactcctagatc

SEQ ID NO: 13320 - RNA, 20 nt, synthetic construct
  source 1..20: mol_type = other RNA
tgaaggaggaggggctggaa

SEQ ID NO: 13321 - RNA, 20 nt, synthetic construct
  source 1..20: mol_type = other RNA
tgaaggagtccaggccccca

SEQ ID NO: 13322 - RNA, 20 nt, synthetic construct
  source 1..20: mol_type = other RNA
tgaaggcctggccggcctga

SEQ ID NO: 13323 - RNA, 20 nt, synthetic construct
  source 1..20: mol_type = other RNA
tgaaggggccgcacgtgccc

SEQ ID NO: 13324 - RNA, 20 nt, synthetic construct
  source 1..20: mol_type = other RNA
tgaatggggagaggctgggg

SEQ ID NO: 13325 - RNA, 20 nt, synthetic construct
  source 1..20: mol_type = other RNA
tgaatggggaggggttgggc

SEQ ID NO: 13326 - RNA, 20 nt, synthetic construct
  source 1..20: mol_type = other RNA
tgacaactgggtggaaataa

SEQ ID NO: 13327 - RNA, 20 nt, synthetic construct
  source 1..20: mol_type = other RNA
tgacacgggccaccgtttct

SEQ ID NO: 13328 - RNA, 20 nt, synthetic construct
  source 1..20: mol_type = other RNA
tgacagcctggggcccaggc

SEQ ID NO: 13329 - RNA, 20 nt, synthetic construct
  source 1..20: mol_type = other RNA
tgaccaaccatccctgtttt

SEQ ID NO: 13330 - RNA, 20 nt, synthetic construct
  source 1..20: mol_type = other RNA
tgaccactgggcaaccaggc

SEQ ID NO: 13331 - RNA, 20 nt, synthetic construct
  source 1..20: mol_type = other RNA
tgaccagcttatgctgtttg

SEQ ID NO: 13332 - RNA, 20 nt, synthetic construct
  source 1..20: mol_type = other RNA
tgacccaaacccagctcccc

SEQ ID NO: 13333 - RNA, 20 nt, synthetic construct
  source 1..20: mol_type = other RNA
tgacccaacagcctctggcc

SEQ ID NO: 13334 - RNA, 20 nt, synthetic construct
  source 1..20: mol_type = other RNA
tgacccttggaaggacctgg

SEQ ID NO: 13335 - RNA, 20 nt, synthetic construct
  source 1..20: mol_type = other RNA
tgacctcatgctcttggccc

SEQ ID NO: 13336 - RNA, 20 nt, synthetic construct
  source 1..20: mol_type = other RNA
tgacctgcccggttctcagt

SEQ ID NO: 13337 - RNA, 20 nt, synthetic construct
  source 1..20: mol_type = other RNA
tgacgcacggaggaacaata

SEQ ID NO: 13338 - RNA, 20 nt, synthetic construct
  source 1..20: mol_type = other RNA
tgacgcggccgtctggtgcg

SEQ ID NO: 13339 - RNA, 20 nt, synthetic construct
  source 1..20: mol_type = other RNA
tgacgggggttttgccgtgt

SEQ ID NO: 13340 - RNA, 20 nt, synthetic construct
  source 1..20: mol_type = other RNA
tgactcttgattcccggcca

SEQ ID NO: 13341 - RNA, 20 nt, synthetic construct
  source 1..20: mol_type = other RNA
tgactgcttggcaaactcac

SEQ ID NO: 13342 - RNA, 20 nt, synthetic construct
  source 1..20: mol_type = other RNA
tgagaaacggtggcccgtgt

SEQ ID NO: 13343 - RNA, 20 nt, synthetic construct
  source 1..20: mol_type = other RNA
tgagaaccgggcaggtcacg

SEQ ID NO: 13344 - RNA, 20 nt, synthetic construct
  source 1..20: mol_type = other RNA
tgagaagccccctcccttcc

SEQ ID NO: 13345 - RNA, 20 nt, synthetic construct
  source 1..20: mol_type = other RNA
tgagaagggaatccctcctc

SEQ ID NO: 13346 - RNA, 20 nt, synthetic construct
  source 1..20: mol_type = other RNA
tgagaatggtgcgtcctagg

SEQ ID NO: 13347 - RNA, 20 nt, synthetic construct
  source 1..20: mol_type = other RNA
tgagacagctgcacacctgt

SEQ ID NO: 13348 - RNA, 20 nt, synthetic construct
  source 1..20: mol_type = other RNA
tgagataaggccagtagcca

SEQ ID NO: 13349 - RNA, 20 nt, synthetic construct
  source 1..20: mol_type = other RNA
tgagatggtggacgaggaag

SEQ ID NO: 13350 - RNA, 20 nt, synthetic construct
  source 1..20: mol_type = other RNA
tgagcactgaaggcctggcc

SEQ ID NO: 13351 - RNA, 20 nt, synthetic construct
  source 1..20: mol_type = other RNA
tgagcactggaagcgccacc

SEQ ID NO: 13352 - RNA, 20 nt, synthetic construct
  source 1..20: mol_type = other RNA
tgagccccgttcccctgcat

SEQ ID NO: 13353 - RNA, 20 nt, synthetic construct
  source 1..20: mol_type = other RNA
tgagcgcctctcctgggctt

SEQ ID NO: 13354 - RNA, 20 nt, synthetic construct
  source 1..20: mol_type = other RNA
tgagctgctctgacgcggcc

SEQ ID NO: 13355 - RNA, 20 nt, synthetic construct
  source 1..20: mol_type = other RNA
tgaggaaggagtgaagctaa

SEQ ID NO: 13356 - RNA, 20 nt, synthetic construct
  source 1..20: mol_type = other RNA
tgaggaggggggtgtccgtg

SEQ ID NO: 13357 - RNA, 20 nt, synthetic construct
  source 1..20: mol_type = other RNA
tgaggccccctctgcacggg

SEQ ID NO: 13358 - RNA, 20 nt, synthetic construct
  source 1..20: mol_type = other RNA
tgaggcctgggcaccaggga

SEQ ID NO: 13359 - RNA, 20 nt, synthetic construct
  source 1..20: mol_type = other RNA
tgaggctggtaccctgcccc

SEQ ID NO: 13360 - RNA, 20 nt, synthetic construct
  source 1..20: mol_type = other RNA
tgagggacttggggggtaat

SEQ ID NO: 13361 - RNA, 20 nt, synthetic construct
  source 1..20: mol_type = other RNA
tgagggcggaagggctgggg

SEQ ID NO: 13362 - RNA, 20 nt, synthetic construct
  source 1..20: mol_type = other RNA
tgagggtggagggactgggg

SEQ ID NO: 13363 - RNA, 20 nt, synthetic construct
  source 1..20: mol_type = other RNA
tgagggtttcagtgctaaaa

SEQ ID NO: 13364 - RNA, 20 nt, synthetic construct
  source 1..20: mol_type = other RNA
tgaggtcatggaaactcggg

SEQ ID NO: 13365 - RNA, 20 nt, synthetic construct
  source 1..20: mol_type = other RNA
tgagtccttggcaagcccag

SEQ ID NO: 13366 - RNA, 20 nt, synthetic construct
  source 1..20: mol_type = other RNA
tgagtctgtcccagcacagg

SEQ ID NO: 13367 - RNA, 20 nt, synthetic construct
  source 1..20: mol_type = other RNA
tgagttctaactttggctct

SEQ ID NO: 13368 - RNA, 20 nt, synthetic construct
  source 1..20: mol_type = other RNA
tgagtttgccaagcagtcac

SEQ ID NO: 13369 - RNA, 20 nt, synthetic construct
  source 1..20: mol_type = other RNA
tgataaacccacgtggggta

SEQ ID NO: 13370 - RNA, 20 nt, synthetic construct
  source 1..20: mol_type = other RNA
tgatcctggtgctgcagctt

SEQ ID NO: 13371 - RNA, 20 nt, synthetic construct
  source 1..20: mol_type = other RNA
tgattcccggccagtttctc

SEQ ID NO: 13372 - RNA, 20 nt, synthetic construct
  source 1..20: mol_type = other RNA
tgattttgtttttccaaact

SEQ ID NO: 13373 - RNA, 20 nt, synthetic construct
  source 1..20: mol_type = other RNA
tgcaaacaggaagtgaacgg

SEQ ID NO: 13374 - RNA, 20 nt, synthetic construct
  source 1..20: mol_type = other RNA
tgcacacctgtgtgcctggg

SEQ ID NO: 13375 - RNA, 20 nt, synthetic construct
  source 1..20: mol_type = other RNA
tgcaccccaattgccttagt

SEQ ID NO: 13376 - RNA, 20 nt, synthetic construct
  source 1..20: mol_type = other RNA
tgcacggggccctgcagcca

SEQ ID NO: 13377 - RNA, 20 nt, synthetic construct
  source 1..20: mol_type = other RNA
tgcagagggggcctcagtga

SEQ ID NO: 13378 - RNA, 20 nt, synthetic construct
  source 1..20: mol_type = other RNA
tgcagagtatctgctggggt

SEQ ID NO: 13379 - RNA, 20 nt, synthetic construct
  source 1..20: mol_type = other RNA
tgcagatagccaggagtcct

SEQ ID NO: 13380 - RNA, 20 nt, synthetic construct
  source 1..20: mol_type = other RNA
tgcagcaccaggatcagtga

SEQ ID NO: 13381 - RNA, 20 nt, synthetic construct
  source 1..20: mol_type = other RNA
tgcagccaggggctgacacg

SEQ ID NO: 13382 - RNA, 20 nt, synthetic construct
  source 1..20: mol_type = other RNA
tgcagctgtctcacccctct

SEQ ID NO: 13383 - RNA, 20 nt, synthetic construct
  source 1..20: mol_type = other RNA
tgcagcttccttacacttcc

SEQ ID NO: 13384 - RNA, 20 nt, synthetic construct
  source 1..20: mol_type = other RNA
tgcaggaacgaagccgtggg

SEQ ID NO: 13385 - RNA, 20 nt, synthetic construct
  source 1..20: mol_type = other RNA
tgcaggaatgggggcagggt

SEQ ID NO: 13386 - RNA, 20 nt, synthetic construct
  source 1..20: mol_type = other RNA
tgcaggacgagaaacacagc

SEQ ID NO: 13387 - RNA, 20 nt, synthetic construct
  source 1..20: mol_type = other RNA
tgcagggccccgtgcagagg

SEQ ID NO: 13388 - RNA, 20 nt, synthetic construct
  source 1..20: mol_type = other RNA
tgcaggggaacggggatgca

SEQ ID NO: 13389 - RNA, 20 nt, synthetic construct
  source 1..20: mol_type = other RNA
tgcaggggaacggggctcag

SEQ ID NO: 13390 - RNA, 20 nt, synthetic construct
  source 1..20: mol_type = other RNA
tgcaggggaagggggatgca

SEQ ID NO: 13391 - RNA, 20 nt, synthetic construct
  source 1..20: mol_type = other RNA
tgcagggtggaggaaggcca

SEQ ID NO: 13392 - RNA, 20 nt, synthetic construct
  source 1..20: mol_type = other RNA
tgcatagccctgggcccacg

SEQ ID NO: 13393 - RNA, 20 nt, synthetic construct
  source 1..20: mol_type = other RNA
tgcatcccccagaggcccca

SEQ ID NO: 13394 - RNA, 20 nt, synthetic construct
  source 1..20: mol_type = other RNA
tgcatcccccttcccctgca

SEQ ID NO: 13395 - RNA, 20 nt, synthetic construct
  source 1..20: mol_type = other RNA
tgcatccccgttcccctgca

SEQ ID NO: 13396 - RNA, 20 nt, synthetic construct
  source 1..20: mol_type = other RNA
tgcatccttctccaggcagg

SEQ ID NO: 13397 - RNA, 20 nt, synthetic construct
  source 1..20: mol_type = other RNA
tgccaagcagtcaccccaca

SEQ ID NO: 13398 - RNA, 20 nt, synthetic construct
  source 1..20: mol_type = other RNA
tgccaaggactcaaacccag

SEQ ID NO: 13399 - RNA, 20 nt, synthetic construct
  source 1..20: mol_type = other RNA
tgccaggacggggctggcta

SEQ ID NO: 13400 - RNA, 20 nt, synthetic construct
  source 1..20: mol_type = other RNA
tgcccaggacagcctagttt

SEQ ID NO: 13401 - RNA, 20 nt, synthetic construct
  source 1..20: mol_type = other RNA
tgcccaggcctcaggcatct

SEQ ID NO: 13402 - RNA, 20 nt, synthetic construct
  source 1..20: mol_type = other RNA
tgcccagtacaggcatccct

SEQ ID NO: 13403 - RNA, 20 nt, synthetic construct
  source 1..20: mol_type = other RNA
tgcccagtggtcaggccggc

SEQ ID NO: 13404 - RNA, 20 nt, synthetic construct
  source 1..20: mol_type = other RNA
tgcccatctggaggaggcgg

SEQ ID NO: 13405 - RNA, 20 nt, synthetic construct
  source 1..20: mol_type = other RNA
tgccccaggccttgtggaca

SEQ ID NO: 13406 - RNA, 20 nt, synthetic construct
  source 1..20: mol_type = other RNA
tgcccccattcctgcacccc

SEQ ID NO: 13407 - RNA, 20 nt, synthetic construct
  source 1..20: mol_type = other RNA
tgcccccctcccctatcgcc

SEQ ID NO: 13408 - RNA, 20 nt, synthetic construct
  source 1..20: mol_type = other RNA
tgcccctggctctcctgccc

SEQ ID NO: 13409 - RNA, 20 nt, synthetic construct
  source 1..20: mol_type = other RNA
tgccccttccctacaggggt

SEQ ID NO: 13410 - RNA, 20 nt, synthetic construct
  source 1..20: mol_type = other RNA
tgcccggttctcagtggcca

SEQ ID NO: 13411 - RNA, 20 nt, synthetic construct
  source 1..20: mol_type = other RNA
tgccctgggaacgggatgaa

SEQ ID NO: 13412 - RNA, 20 nt, synthetic construct
  source 1..20: mol_type = other RNA
tgccgtgtctaacaggtacc

SEQ ID NO: 13413 - RNA, 20 nt, synthetic construct
  source 1..20: mol_type = other RNA
tgcctgaggcctgggcacca

SEQ ID NO: 13414 - RNA, 20 nt, synthetic construct
  source 1..20: mol_type = other RNA
tgcctggagaaggatgcagg

SEQ ID NO: 13415 - RNA, 20 nt, synthetic construct
  source 1..20: mol_type = other RNA
tgcctgggccccaggctgtc

SEQ ID NO: 13416 - RNA, 20 nt, synthetic construct
  source 1..20: mol_type = other RNA
tgcctgtactgggcaggtcc

SEQ ID NO: 13417 - RNA, 20 nt, synthetic construct
  source 1..20: mol_type = other RNA
tgccttaaacccagccaggt

SEQ ID NO: 13418 - RNA, 20 nt, synthetic construct
  source 1..20: mol_type = other RNA
tgccttagtggctagggggt

SEQ ID NO: 13419 - RNA, 20 nt, synthetic construct
  source 1..20: mol_type = other RNA
tgccttttgggtggattctc

SEQ ID NO: 13420 - RNA, 20 nt, synthetic construct
  source 1..20: mol_type = other RNA
tgcgctaccctctcccagaa

SEQ ID NO: 13421 - RNA, 20 nt, synthetic construct
  source 1..20: mol_type = other RNA
tgcggccccttcacagcccg

SEQ ID NO: 13422 - RNA, 20 nt, synthetic construct
  source 1..20: mol_type = other RNA
tgcgggaaccccacatggta

SEQ ID NO: 13423 - RNA, 20 nt, synthetic construct
  source 1..20: mol_type = other RNA
tgcgtcagttttacctgtga

SEQ ID NO: 13424 - RNA, 20 nt, synthetic construct
  source 1..20: mol_type = other RNA
tgcgtcctaggtgttcacca

SEQ ID NO: 13425 - RNA, 20 nt, synthetic construct
  source 1..20: mol_type = other RNA
tgcgtgacctgcccggttct

SEQ ID NO: 13426 - RNA, 20 nt, synthetic construct
  source 1..20: mol_type = other RNA
tgcgtttcactgatcctggt

SEQ ID NO: 13427 - RNA, 20 nt, synthetic construct
  source 1..20: mol_type = other RNA
tgctaaaactaggctgtcct

SEQ ID NO: 13428 - RNA, 20 nt, synthetic construct
  source 1..20: mol_type = other RNA
tgctaggacagtggggaaaa

SEQ ID NO: 13429 - RNA, 20 nt, synthetic construct
  source 1..20: mol_type = other RNA
tgctatctgggacatattcc

SEQ ID NO: 13430 - RNA, 20 nt, synthetic construct
  source 1..20: mol_type = other RNA
tgctcagactagggaagagg

SEQ ID NO: 13431 - RNA, 20 nt, synthetic construct
  source 1..20: mol_type = other RNA
tgctcagtggaaaccacgaa

SEQ ID NO: 13432 - RNA, 20 nt, synthetic construct
  source 1..20: mol_type = other RNA
tgctccaggcctcctgggat

SEQ ID NO: 13433 - RNA, 20 nt, synthetic construct
  source 1..20: mol_type = other RNA
tgctctccttgcccccctcc

SEQ ID NO: 13434 - RNA, 20 nt, synthetic construct
  source 1..20: mol_type = other RNA
tgctctgacgcggccgtctg

SEQ ID NO: 13435 - RNA, 20 nt, synthetic construct
  source 1..20: mol_type = other RNA
tgctctgggcggaggaatat

SEQ ID NO: 13436 - RNA, 20 nt, synthetic construct
  source 1..20: mol_type = other RNA
tgctctgggcttctgggttt

SEQ ID NO: 13437 - RNA, 20 nt, synthetic construct
  source 1..20: mol_type = other RNA
tgctcttcagactgagcccc

SEQ ID NO: 13438 - RNA, 20 nt, synthetic construct
  source 1..20: mol_type = other RNA
tgctcttggccctcgtagct

SEQ ID NO: 13439 - RNA, 20 nt, synthetic construct
  source 1..20: mol_type = other RNA
tgctgcagcttccttacact

SEQ ID NO: 13440 - RNA, 20 nt, synthetic construct
  source 1..20: mol_type = other RNA
tgctgggacagactcagggg

SEQ ID NO: 13441 - RNA, 20 nt, synthetic construct
  source 1..20: mol_type = other RNA
tgctggggtggtttccgagc

SEQ ID NO: 13442 - RNA, 20 nt, synthetic construct
  source 1..20: mol_type = other RNA
tgctgtggctgttcccaagt

SEQ ID NO: 13443 - RNA, 20 nt, synthetic construct
  source 1..20: mol_type = other RNA
tgctgtttgcccaggacagc

SEQ ID NO: 13444 - RNA, 20 nt, synthetic construct
  source 1..20: mol_type = other RNA
tgcttctcctcttgggaagt

SEQ ID NO: 13445 - RNA, 20 nt, synthetic construct
  source 1..20: mol_type = other RNA
tgcttcttggccacgtaacc

SEQ ID NO: 13446 - RNA, 20 nt, synthetic construct
  source 1..20: mol_type = other RNA
tgcttggcaaactcactctt

SEQ ID NO: 13447 - RNA, 20 nt, synthetic construct
  source 1..20: mol_type = other RNA
tgcttggggacctgcctgga

SEQ ID NO: 13448 - RNA, 20 nt, synthetic construct
  source 1..20: mol_type = other RNA
tggaaaaacaaaatcagaat

SEQ ID NO: 13449 - RNA, 20 nt, synthetic construct
  source 1..20: mol_type = other RNA
tggaaaactccctttgtgag

SEQ ID NO: 13450 - RNA, 20 nt, synthetic construct
  source 1..20: mol_type = other RNA
tggaaaccacgaaaggactc

SEQ ID NO: 13451 - RNA, 20 nt, synthetic construct
  source 1..20: mol_type = other RNA
tggaaactcgggctgtgaag

SEQ ID NO: 13452 - RNA, 20 nt, synthetic construct
  source 1..20: mol_type = other RNA
tggaaataaacgagccgagt

SEQ ID NO: 13453 - RNA, 20 nt, synthetic construct
  source 1..20: mol_type = other RNA
tggaacctcttccctagtct

SEQ ID NO: 13454 - RNA, 20 nt, synthetic construct
  source 1..20: mol_type = other RNA
tggaagcgccacctgtgggt

SEQ ID NO: 13455 - RNA, 20 nt, synthetic construct
  source 1..20: mol_type = other RNA
tggaaggacctggctgggtt

SEQ ID NO: 13456 - RNA, 20 nt, synthetic construct
  source 1..20: mol_type = other RNA
tggacactgggtgggctccg

SEQ ID NO: 13457 - RNA, 20 nt, synthetic construct
  source 1..20: mol_type = other RNA
tggaccccacgagaggccac

SEQ ID NO: 13458 - RNA, 20 nt, synthetic construct
  source 1..20: mol_type = other RNA
tggacccctaagggaagaat

SEQ ID NO: 13459 - RNA, 20 nt, synthetic construct
  source 1..20: mol_type = other RNA
tggacccctgggtctgaatg

SEQ ID NO: 13460 - RNA, 20 nt, synthetic construct
  source 1..20: mol_type = other RNA
tggacgaggaagggggacag

SEQ ID NO: 13461 - RNA, 20 nt, synthetic construct
  source 1..20: mol_type = other RNA
tggactcctgggtctgaggg

SEQ ID NO: 13462 - RNA, 20 nt, synthetic construct
  source 1..20: mol_type = other RNA
tggactccttcatctgaggg

SEQ ID NO: 13463 - RNA, 20 nt, synthetic construct
  source 1..20: mol_type = other RNA
tggactctggagtccctggt

SEQ ID NO: 13464 - RNA, 20 nt, synthetic construct
  source 1..20: mol_type = other RNA
tggacttcggcttttgtccc

SEQ ID NO: 13465 - RNA, 20 nt, synthetic construct
  source 1..20: mol_type = other RNA
tggacttctgggtcttaggg

SEQ ID NO: 13466 - RNA, 20 nt, synthetic construct
  source 1..20: mol_type = other RNA
tggagaaactggccgggaat

SEQ ID NO: 13467 - RNA, 20 nt, synthetic construct
  source 1..20: mol_type = other RNA
tggagaaagagaaagggagt

SEQ ID NO: 13468 - RNA, 20 nt, synthetic construct
  source 1..20: mol_type = other RNA
tggagaaggatgcaggacga

SEQ ID NO: 13469 - RNA, 20 nt, synthetic construct
  source 1..20: mol_type = other RNA
tggagaggtgagggacttgg

SEQ ID NO: 13470 - RNA, 20 nt, synthetic construct
  source 1..20: mol_type = other RNA
tggagcattggggtgggctg

SEQ ID NO: 13471 - RNA, 20 nt, synthetic construct
  source 1..20: mol_type = other RNA
tggagccaggattcttaggg

SEQ ID NO: 13472 - RNA, 20 nt, synthetic construct
  source 1..20: mol_type = other RNA
tggagctgaggaaggagtga

SEQ ID NO: 13473 - RNA, 20 nt, synthetic construct
  source 1..20: mol_type = other RNA
tggaggaaggccaccctgtg

SEQ ID NO: 13474 - RNA, 20 nt, synthetic construct
  source 1..20: mol_type = other RNA
tggaggagaatccacccaaa

SEQ ID NO: 13475 - RNA, 20 nt, synthetic construct
  source 1..20: mol_type = other RNA
tggaggaggcgggagggagc

SEQ ID NO: 13476 - RNA, 20 nt, synthetic construct
  source 1..20: mol_type = other RNA
tggagggactgggggcctgg

SEQ ID NO: 13477 - RNA, 20 nt, synthetic construct
  source 1..20: mol_type = other RNA
tggagtcccgacttgctggg

SEQ ID NO: 13478 - RNA, 20 nt, synthetic construct
  source 1..20: mol_type = other RNA
tggagtccctggtgcccagg

SEQ ID NO: 13479 - RNA, 20 nt, synthetic construct
  source 1..20: mol_type = other RNA
tggagtgtgacagcctgggg

SEQ ID NO: 13480 - RNA, 20 nt, synthetic construct
  source 1..20: mol_type = other RNA
tggatctaggagtttagctt

SEQ ID NO: 13481 - RNA, 20 nt, synthetic construct
  source 1..20: mol_type = other RNA
tggatctgttttcgtggctc

SEQ ID NO: 13482 - RNA, 20 nt, synthetic construct
  source 1..20: mol_type = other RNA
tggattctcctccaactgtg

SEQ ID NO: 13483 - RNA, 20 nt, synthetic construct
  source 1..20: mol_type = other RNA
tggcaaactcactcttcggg

SEQ ID NO: 13484 - RNA, 20 nt, synthetic construct
  source 1..20: mol_type = other RNA
tggcaagcccaggagaggcg

SEQ ID NO: 13485 - RNA, 20 nt, synthetic construct
  source 1..20: mol_type = other RNA
tggcagggctgtggtgagga

SEQ ID NO: 13486 - RNA, 20 nt, synthetic construct
  source 1..20: mol_type = other RNA
tggccaagaagcaggggagc

SEQ ID NO: 13487 - RNA, 20 nt, synthetic construct
  source 1..20: mol_type = other RNA
tggccaccctgcgctaccct

SEQ ID NO: 13488 - RNA, 20 nt, synthetic construct
  source 1..20: mol_type = other RNA
tggccacgtaacctgagaag

SEQ ID NO: 13489 - RNA, 20 nt, synthetic construct
  source 1..20: mol_type = other RNA
tggccactgagaaccgggca

SEQ ID NO: 13490 - RNA, 20 nt, synthetic construct
  source 1..20: mol_type = other RNA
tggccactggctgtttaaga

SEQ ID NO: 13491 - RNA, 20 nt, synthetic construct
  source 1..20: mol_type = other RNA
tggccagaggctgttgggtc

SEQ ID NO: 13492 - RNA, 20 nt, synthetic construct
  source 1..20: mol_type = other RNA
tggcccccagcccctcctgc

SEQ ID NO: 13493 - RNA, 20 nt, synthetic construct
  source 1..20: mol_type = other RNA
tggcccgtgtcagcccctgg

SEQ ID NO: 13494 - RNA, 20 nt, synthetic construct
  source 1..20: mol_type = other RNA
tggccctcgtagctccctcc

SEQ ID NO: 13495 - RNA, 20 nt, synthetic construct
  source 1..20: mol_type = other RNA
tggccgcctctactcccttt

SEQ ID NO: 13496 - RNA, 20 nt, synthetic construct
  source 1..20: mol_type = other RNA
tggccggcctgaccactggg

SEQ ID NO: 13497 - RNA, 20 nt, synthetic construct
  source 1..20: mol_type = other RNA
tggccgggaatcaagagtca

SEQ ID NO: 13498 - RNA, 20 nt, synthetic construct
  source 1..20: mol_type = other RNA
tggcctcctgggttgaatgg

SEQ ID NO: 13499 - RNA, 20 nt, synthetic construct
  source 1..20: mol_type = other RNA
tggcctctcgtggggtccag

SEQ ID NO: 13500 - RNA, 20 nt, synthetic construct
  source 1..20: mol_type = other RNA
tggcctggaccccacgagag

SEQ ID NO: 13501 - RNA, 20 nt, synthetic construct
  source 1..20: mol_type = other RNA
tggcctggggcctctggggg

SEQ ID NO: 13502 - RNA, 20 nt, synthetic construct
  source 1..20: mol_type = other RNA
tggccttatctcacaggtaa

SEQ ID NO: 13503 - RNA, 20 nt, synthetic construct
  source 1..20: mol_type = other RNA
tggccttcctccaccctgca

SEQ ID NO: 13504 - RNA, 20 nt, synthetic construct
  source 1..20: mol_type = other RNA
tggcgataggggaggggggc

SEQ ID NO: 13505 - RNA, 20 nt, synthetic construct
  source 1..20: mol_type = other RNA
tggcgcttccagtgctcaga

SEQ ID NO: 13506 - RNA, 20 nt, synthetic construct
  source 1..20: mol_type = other RNA
tggctactggccttatctca

SEQ ID NO: 13507 - RNA, 20 nt, synthetic construct
  source 1..20: mol_type = other RNA
tggctagggggttgggggct

SEQ ID NO: 13508 - RNA, 20 nt, synthetic construct
  source 1..20: mol_type = other RNA
tggctatctgcaaacaggaa

SEQ ID NO: 13509 - RNA, 20 nt, synthetic construct
  source 1..20: mol_type = other RNA
tggctccagcccctcctact

SEQ ID NO: 13510 - RNA, 20 nt, synthetic construct
  source 1..20: mol_type = other RNA
tggctccctctggagtcccg

SEQ ID NO: 13511 - RNA, 20 nt, synthetic construct
  source 1..20: mol_type = other RNA
tggctctcctgccccttccc

SEQ ID NO: 13512 - RNA, 20 nt, synthetic construct
  source 1..20: mol_type = other RNA
tggctctgaaggaggagggg

SEQ ID NO: 13513 - RNA, 20 nt, synthetic construct
  source 1..20: mol_type = other RNA
tggctctgctcttcagactg

SEQ ID NO: 13514 - RNA, 20 nt, synthetic construct
  source 1..20: mol_type = other RNA
tggctcttcacctttctagt

SEQ ID NO: 13515 - RNA, 20 nt, synthetic construct
  source 1..20: mol_type = other RNA
tggctgcagggccccgtgca

SEQ ID NO: 13516 - RNA, 20 nt, synthetic construct
  source 1..20: mol_type = other RNA
tggctgggtttaaggcagga

SEQ ID NO: 13517 - RNA, 20 nt, synthetic construct
  source 1..20: mol_type = other RNA
tggctgttcccaagttctta

SEQ ID NO: 13518 - RNA, 20 nt, synthetic construct
  source 1..20: mol_type = other RNA
tggctgtttaagatacgcct

SEQ ID NO: 13519 - RNA, 20 nt, synthetic construct
  source 1..20: mol_type = other RNA
tgggaacagccacagcaggg

SEQ ID NO: 13520 - RNA, 20 nt, synthetic construct
  source 1..20: mol_type = other RNA
tgggaacgggatgaactcgg

SEQ ID NO: 13521 - RNA, 20 nt, synthetic construct
  source 1..20: mol_type = other RNA
tgggaagtgtaaggaagctg

SEQ ID NO: 13522 - RNA, 20 nt, synthetic construct
  source 1..20: mol_type = other RNA
tgggacagactcaggggcct

SEQ ID NO: 13523 - RNA, 20 nt, synthetic construct
  source 1..20: mol_type = other RNA
tgggacatattcctccgccc

SEQ ID NO: 13524 - RNA, 20 nt, synthetic construct
  source 1..20: mol_type = other RNA
tgggagagggtagcgcaggg

SEQ ID NO: 13525 - RNA, 20 nt, synthetic construct
  source 1..20: mol_type = other RNA
tgggagtcccgcccaggccc

SEQ ID NO: 13526 - RNA, 20 nt, synthetic construct
  source 1..20: mol_type = other RNA
tgggataccccgaagagtga

SEQ ID NO: 13527 - RNA, 20 nt, synthetic construct
  source 1..20: mol_type = other RNA
tgggcaaacagcataagctg

SEQ ID NO: 13528 - RNA, 20 nt, synthetic construct
  source 1..20: mol_type = other RNA
tgggcaaccaggcgtatctt

SEQ ID NO: 13529 - RNA, 20 nt, synthetic construct
  source 1..20: mol_type = other RNA
tgggcaccagggactccaga

SEQ ID NO: 13530 - RNA, 20 nt, synthetic construct
  source 1..20: mol_type = other RNA
tgggcagctttggagaggtg

SEQ ID NO: 13531 - RNA, 20 nt, synthetic construct
  source 1..20: mol_type = other RNA
tgggcaggtccttgaaaggg

SEQ ID NO: 13532 - RNA, 20 nt, synthetic construct
  source 1..20: mol_type = other RNA
tgggcccacggcttcgttcc

SEQ ID NO: 13533 - RNA, 20 nt, synthetic construct
  source 1..20: mol_type = other RNA
tgggcccagggctatgcagg

SEQ ID NO: 13534 - RNA, 20 nt, synthetic construct
  source 1..20: mol_type = other RNA
tgggccccaggctgtcacac

SEQ ID NO: 13535 - RNA, 20 nt, synthetic construct
  source 1..20: mol_type = other RNA
tgggcctggacccctgggtc

SEQ ID NO: 13536 - RNA, 20 nt, synthetic construct
  source 1..20: mol_type = other RNA
tgggcctggactctggagtc

SEQ ID NO: 13537 - RNA, 20 nt, synthetic construct
  source 1..20: mol_type = other RNA
tgggcctttccctttcaagg

SEQ ID NO: 13538 - RNA, 20 nt, synthetic construct
  source 1..20: mol_type = other RNA
tgggcggaggaatatgtccc

SEQ ID NO: 13539 - RNA, 20 nt, synthetic construct
  source 1..20: mol_type = other RNA
tgggcgggactcccagaggg

SEQ ID NO: 13540 - RNA, 20 nt, synthetic construct
  source 1..20: mol_type = other RNA
tgggctccgggacctgaact

SEQ ID NO: 13541 - RNA, 20 nt, synthetic construct
  source 1..20: mol_type = other RNA
tgggctcctgggtttgagag

SEQ ID NO: 13542 - RNA, 20 nt, synthetic construct
  source 1..20: mol_type = other RNA
tgggctggggttcagagagg

SEQ ID NO: 13543 - RNA, 20 nt, synthetic construct
  source 1..20: mol_type = other RNA
tgggcttctgggtttgagtc

SEQ ID NO: 13544 - RNA, 20 nt, synthetic construct
  source 1..20: mol_type = other RNA
tgggcttgccaaggactcaa

SEQ ID NO: 13545 - RNA, 20 nt, synthetic construct
  source 1..20: mol_type = other RNA
tggggaaaatgacccaacag

SEQ ID NO: 13546 - RNA, 20 nt, synthetic construct
  source 1..20: mol_type = other RNA
tggggacctgcctggagaag

SEQ ID NO: 13547 - RNA, 20 nt, synthetic construct
  source 1..20: mol_type = other RNA
tggggactagaaaggtgaag

SEQ ID NO: 13548 - RNA, 20 nt, synthetic construct
  source 1..20: mol_type = other RNA
tggggactctttaaggaaag

SEQ ID NO: 13549 - RNA, 20 nt, synthetic construct
  source 1..20: mol_type = other RNA
tggggagaggctgggggcct

SEQ ID NO: 13550 - RNA, 20 nt, synthetic construct
  source 1..20: mol_type = other RNA
tggggaggggttgggcctgg

SEQ ID NO: 13551 - RNA, 20 nt, synthetic construct
  source 1..20: mol_type = other RNA
tggggcaagtccctcctccg

SEQ ID NO: 13552 - RNA, 20 nt, synthetic construct
  source 1..20: mol_type = other RNA
tggggcccaggcacacaggt

SEQ ID NO: 13553 - RNA, 20 nt, synthetic construct
  source 1..20: mol_type = other RNA
tggggcctctgggggatgca

SEQ ID NO: 13554 - RNA, 20 nt, synthetic construct
  source 1..20: mol_type = other RNA
tggggcctggactcctgggt

SEQ ID NO: 13555 - RNA, 20 nt, synthetic construct
  source 1..20: mol_type = other RNA
tggggcctggcctcctgggt

SEQ ID NO: 13556 - RNA, 20 nt, synthetic construct
  source 1..20: mol_type = other RNA
tggggctgtgtttctcgtcc

SEQ ID NO: 13557 - RNA, 20 nt, synthetic construct
  source 1..20: mol_type = other RNA
tgggggatgcaggggaaggg

SEQ ID NO: 13558 - RNA, 20 nt, synthetic construct
  source 1..20: mol_type = other RNA
tgggggcagggtaccagcct

SEQ ID NO: 13559 - RNA, 20 nt, synthetic construct
  source 1..20: mol_type = other RNA
tgggggccaggactcctggc

SEQ ID NO: 13560 - RNA, 20 nt, synthetic construct
  source 1..20: mol_type = other RNA
tgggggcctggactccttca

SEQ ID NO: 13561 - RNA, 20 nt, synthetic construct
  source 1..20: mol_type = other RNA
tgggggcctggacttctggg

SEQ ID NO: 13562 - RNA, 20 nt, synthetic construct
  source 1..20: mol_type = other RNA
tgggggcctgggctcctggg

SEQ ID NO: 13563 - RNA, 20 nt, synthetic construct
  source 1..20: mol_type = other RNA
tgggggctagagtaggaggg

SEQ ID NO: 13564 - RNA, 20 nt, synthetic construct
  source 1..20: mol_type = other RNA
tggggggacaaaagccgaag

SEQ ID NO: 13565 - RNA, 20 nt, synthetic construct
  source 1..20: mol_type = other RNA
tggggggtaatttatcccgt

SEQ ID NO: 13566 - RNA, 20 nt, synthetic construct
  source 1..20: mol_type = other RNA
tggggtaccctaagaacttg

SEQ ID NO: 13567 - RNA, 20 nt, synthetic construct
  source 1..20: mol_type = other RNA
tggggtccaggccaagtagg

SEQ ID NO: 13568 - RNA, 20 nt, synthetic construct
  source 1..20: mol_type = other RNA
tggggtgaccagcttatgct

SEQ ID NO: 13569 - RNA, 20 nt, synthetic construct
  source 1..20: mol_type = other RNA
tggggtgactgcttggcaaa

SEQ ID NO: 13570 - RNA, 20 nt, synthetic construct
  source 1..20: mol_type = other RNA
tggggtgcaggaatgggggc

SEQ ID NO: 13571 - RNA, 20 nt, synthetic construct
  source 1..20: mol_type = other RNA
tggggtggcctctcgtgggg

SEQ ID NO: 13572 - RNA, 20 nt, synthetic construct
  source 1..20: mol_type = other RNA
tggggtgggctggggttcag

SEQ ID NO: 13573 - RNA, 20 nt, synthetic construct
  source 1..20: mol_type = other RNA
tggggtggtttccgagcttg

SEQ ID NO: 13574 - RNA, 20 nt, synthetic construct
  source 1..20: mol_type = other RNA
tggggttcagagaggaggga

SEQ ID NO: 13575 - RNA, 20 nt, synthetic construct
  source 1..20: mol_type = other RNA
tggggttcccgcacccagat

SEQ ID NO: 13576 - RNA, 20 nt, synthetic construct
  source 1..20: mol_type = other RNA
tgggtcaggtctgggtgtgg

SEQ ID NO: 13577 - RNA, 20 nt, synthetic construct
  source 1..20: mol_type = other RNA
tgggtcattttccccactgt

SEQ ID NO: 13578 - RNA, 20 nt, synthetic construct
  source 1..20: mol_type = other RNA
tgggtctgaatggggagagg

SEQ ID NO: 13579 - RNA, 20 nt, synthetic construct
  source 1..20: mol_type = other RNA
tgggtctgagggtggaggga

SEQ ID NO: 13580 - RNA, 20 nt, synthetic construct
  source 1..20: mol_type = other RNA
tgggtcttagggaggcgggg

SEQ ID NO: 13581 - RNA, 20 nt, synthetic construct
  source 1..20: mol_type = other RNA
tgggtgactcttgattcccg

SEQ ID NO: 13582 - RNA, 20 nt, synthetic construct
  source 1..20: mol_type = other RNA
tgggtgcgggaaccccacat

SEQ ID NO: 13583 - RNA, 20 nt, synthetic construct
  source 1..20: mol_type = other RNA
tgggtggaaataaacgagcc

SEQ ID NO: 13584 - RNA, 20 nt, synthetic construct
  source 1..20: mol_type = other RNA
tgggtggattctcctccaac

SEQ ID NO: 13585 - RNA, 20 nt, synthetic construct
  source 1..20: mol_type = other RNA
tgggtgggctccgggacctg

SEQ ID NO: 13586 - RNA, 20 nt, synthetic construct
  source 1..20: mol_type = other RNA
tgggtggtgacgggggtttt

SEQ ID NO: 13587 - RNA, 20 nt, synthetic construct
  source 1..20: mol_type = other RNA
tgggtgtggggtgaccagct

SEQ ID NO: 13588 - RNA, 20 nt, synthetic construct
  source 1..20: mol_type = other RNA
tgggttgaatggggaggggt

SEQ ID NO: 13589 - RNA, 20 nt, synthetic construct
  source 1..20: mol_type = other RNA
tgggtttaaggcaggagggg

SEQ ID NO: 13590 - RNA, 20 nt, synthetic construct
  source 1..20: mol_type = other RNA
tgggtttatcaaccacttgg

SEQ ID NO: 13591 - RNA, 20 nt, synthetic construct
  source 1..20: mol_type = other RNA
tgggtttgagagaggagggg

SEQ ID NO: 13592 - RNA, 20 nt, synthetic construct
  source 1..20: mol_type = other RNA
tgggtttgagtccttggcaa

SEQ ID NO: 13593 - RNA, 20 nt, synthetic construct
  source 1..20: mol_type = other RNA
tgggtttgggtcaggtctgg

SEQ ID NO: 13594 - RNA, 20 nt, synthetic construct
  source 1..20: mol_type = other RNA
tggtaccctgcccccattcc

SEQ ID NO: 13595 - RNA, 20 nt, synthetic construct
  source 1..20: mol_type = other RNA
tggtacctgttagacacggc

SEQ ID NO: 13596 - RNA, 20 nt, synthetic construct
  source 1..20: mol_type = other RNA
tggtagacagggctggggtg

SEQ ID NO: 13597 - RNA, 20 nt, synthetic construct
  source 1..20: mol_type = other RNA
tggtcaccccacacccagac

SEQ ID NO: 13598 - RNA, 20 nt, synthetic construct
  source 1..20: mol_type = other RNA
tggtcactgtctctgggtga

SEQ ID NO: 13599 - RNA, 20 nt, synthetic construct
  source 1..20: mol_type = other RNA
tggtcaggccggccaggcct

SEQ ID NO: 13600 - RNA, 20 nt, synthetic construct
  source 1..20: mol_type = other RNA
tggtcctgagttctaacttt

SEQ ID NO: 13601 - RNA, 20 nt, synthetic construct
  source 1..20: mol_type = other RNA
tggtgaacacctaggacgca

SEQ ID NO: 13602 - RNA, 20 nt, synthetic construct
  source 1..20: mol_type = other RNA
tggtgacgggggttttgccg

SEQ ID NO: 13603 - RNA, 20 nt, synthetic construct
  source 1..20: mol_type = other RNA
tggtgaggaggggggtgtcc

SEQ ID NO: 13604 - RNA, 20 nt, synthetic construct
  source 1..20: mol_type = other RNA
tggtgaggctggtaccctgc

SEQ ID NO: 13605 - RNA, 20 nt, synthetic construct
  source 1..20: mol_type = other RNA
tggtgcccaggcctcaggca

SEQ ID NO: 13606 - RNA, 20 nt, synthetic construct
  source 1..20: mol_type = other RNA
tggtgcgtcctaggtgttca

SEQ ID NO: 13607 - RNA, 20 nt, synthetic construct
  source 1..20: mol_type = other RNA
tggtgcgtttcactgatcct

SEQ ID NO: 13608 - RNA, 20 nt, synthetic construct
  source 1..20: mol_type = other RNA
tggtgctgcagcttccttac

SEQ ID NO: 13609 - RNA, 20 nt, synthetic construct
  source 1..20: mol_type = other RNA
tggtggacgaggaaggggga

SEQ ID NO: 13610 - RNA, 20 nt, synthetic construct
  source 1..20: mol_type = other RNA
tggttgataaacccacgtgg

SEQ ID NO: 13611 - RNA, 20 nt, synthetic construct
  source 1..20: mol_type = other RNA
tggttgcccagtggtcaggc

SEQ ID NO: 13612 - RNA, 20 nt, synthetic construct
  source 1..20: mol_type = other RNA
tggttggtcactgtctctgg

SEQ ID NO: 13613 - RNA, 20 nt, synthetic construct
  source 1..20: mol_type = other RNA
tggtttccactgagcactga

SEQ ID NO: 13614 - RNA, 20 nt, synthetic construct
  source 1..20: mol_type = other RNA
tggtttccgagcttgaccct

SEQ ID NO: 13615 - RNA, 20 nt, synthetic construct
  source 1..20: mol_type = other RNA
tgtaaggaagctgcagcacc

SEQ ID NO: 13616 - RNA, 20 nt, synthetic construct
  source 1..20: mol_type = other RNA
tgtactgggcaggtccttga

SEQ ID NO: 13617 - RNA, 20 nt, synthetic construct
  source 1..20: mol_type = other RNA
tgtagggaaggggcaggaga

SEQ ID NO: 13618 - RNA, 20 nt, synthetic construct
  source 1..20: mol_type = other RNA
tgtcacactccagttcactg

SEQ ID NO: 13619 - RNA, 20 nt, synthetic construct
  source 1..20: mol_type = other RNA
tgtcagcccctggctgcagg

SEQ ID NO: 13620 - RNA, 20 nt, synthetic construct
  source 1..20: mol_type = other RNA
tgtcatggcgataggggagg

SEQ ID NO: 13621 - RNA, 20 nt, synthetic construct
  source 1..20: mol_type = other RNA
tgtccacaaggcctggggca

SEQ ID NO: 13622 - RNA, 20 nt, synthetic construct
  source 1..20: mol_type = other RNA
tgtcccagatagcactgggg

SEQ ID NO: 13623 - RNA, 20 nt, synthetic construct
  source 1..20: mol_type = other RNA
tgtcccagcaagtcgggact

SEQ ID NO: 13624 - RNA, 20 nt, synthetic construct
  source 1..20: mol_type = other RNA
tgtcccagcacagggtggcc

SEQ ID NO: 13625 - RNA, 20 nt, synthetic construct
  source 1..20: mol_type = other RNA
tgtccccccaagttttggac

SEQ ID NO: 13626 - RNA, 20 nt, synthetic construct
  source 1..20: mol_type = other RNA
tgtcccccttcctcgtccac

SEQ ID NO: 13627 - RNA, 20 nt, synthetic construct
  source 1..20: mol_type = other RNA
tgtccctggatctgttttcg

SEQ ID NO: 13628 - RNA, 20 nt, synthetic construct
  source 1..20: mol_type = other RNA
tgtccgtgtggaaaactccc

SEQ ID NO: 13629 - RNA, 20 nt, synthetic construct
  source 1..20: mol_type = other RNA
tgtcctagcaccgtgtccct

SEQ ID NO: 13630 - RNA, 20 nt, synthetic construct
  source 1..20: mol_type = other RNA
tgtcctgggcaaacagcata

SEQ ID NO: 13631 - RNA, 20 nt, synthetic construct
  source 1..20: mol_type = other RNA
tgtctaacaggtaccatgtg

SEQ ID NO: 13632 - RNA, 20 nt, synthetic construct
  source 1..20: mol_type = other RNA
tgtctaccaggctgcctttt

SEQ ID NO: 13633 - RNA, 20 nt, synthetic construct
  source 1..20: mol_type = other RNA
tgtctcacccctctgggagt

SEQ ID NO: 13634 - RNA, 20 nt, synthetic construct
  source 1..20: mol_type = other RNA
tgtctctgggtgactcttga

SEQ ID NO: 13635 - RNA, 20 nt, synthetic construct
  source 1..20: mol_type = other RNA
tgtgaaagatgcctgaggcc

SEQ ID NO: 13636 - RNA, 20 nt, synthetic construct
  source 1..20: mol_type = other RNA
tgtgaaggggccgcacgtgc

SEQ ID NO: 13637 - RNA, 20 nt, synthetic construct
  source 1..20: mol_type = other RNA
tgtgacagcctggggcccag

SEQ ID NO: 13638 - RNA, 20 nt, synthetic construct
  source 1..20: mol_type = other RNA
tgtgagaatggtgcgtccta

SEQ ID NO: 13639 - RNA, 20 nt, synthetic construct
  source 1..20: mol_type = other RNA
tgtgagataaggccagtagc

SEQ ID NO: 13640 - RNA, 20 nt, synthetic construct
  source 1..20: mol_type = other RNA
tgtgcagctgtctcacccct

SEQ ID NO: 13641 - RNA, 20 nt, synthetic construct
  source 1..20: mol_type = other RNA
tgtgcctgggccccaggctg

SEQ ID NO: 13642 - RNA, 20 nt, synthetic construct
  source 1..20: mol_type = other RNA
tgtgctgggacagactcagg

SEQ ID NO: 13643 - RNA, 20 nt, synthetic construct
  source 1..20: mol_type = other RNA
tgtggaaaactccctttgtg

SEQ ID NO: 13644 - RNA, 20 nt, synthetic construct
  source 1..20: mol_type = other RNA
tgtggacactgggtgggctc

SEQ ID NO: 13645 - RNA, 20 nt, synthetic construct
  source 1..20: mol_type = other RNA
tgtggctgttcccaagttct

SEQ ID NO: 13646 - RNA, 20 nt, synthetic construct
  source 1..20: mol_type = other RNA
tgtggggtgaccagcttatg

SEQ ID NO: 13647 - RNA, 20 nt, synthetic construct
  source 1..20: mol_type = other RNA
tgtggggtgactgcttggca

SEQ ID NO: 13648 - RNA, 20 nt, synthetic construct
  source 1..20: mol_type = other RNA
tgtggggttcccgcacccag

SEQ ID NO: 13649 - RNA, 20 nt, synthetic construct
  source 1..20: mol_type = other RNA
tgtgggtggtgacgggggtt

SEQ ID NO: 13650 - RNA, 20 nt, synthetic construct
  source 1..20: mol_type = other RNA
tgtggtgaggaggggggtgt

SEQ ID NO: 13651 - RNA, 20 nt, synthetic construct
  source 1..20: mol_type = other RNA
tgtgtgcctgggccccaggc

SEQ ID NO: 13652 - RNA, 20 nt, synthetic construct
  source 1..20: mol_type = other RNA
tgtgtttctcgtcctgcatc

SEQ ID NO: 13653 - RNA, 20 nt, synthetic construct
  source 1..20: mol_type = other RNA
tgttagacacggcaaaaccc

SEQ ID NO: 13654 - RNA, 20 nt, synthetic construct
  source 1..20: mol_type = other RNA
tgttcaccaggtcgtggccg

SEQ ID NO: 13655 - RNA, 20 nt, synthetic construct
  source 1..20: mol_type = other RNA
tgttcagccctaagaatcct

SEQ ID NO: 13656 - RNA, 20 nt, synthetic construct
  source 1..20: mol_type = other RNA
tgttcccaagttcttagggt

SEQ ID NO: 13657 - RNA, 20 nt, synthetic construct
  source 1..20: mol_type = other RNA
tgttcctccgtgcgtcagtt

SEQ ID NO: 13658 - RNA, 20 nt, synthetic construct
  source 1..20: mol_type = other RNA
tgttgggtcattttccccac

SEQ ID NO: 13659 - RNA, 20 nt, synthetic construct
  source 1..20: mol_type = other RNA
tgtttaagatacgcctggtt

SEQ ID NO: 13660 - RNA, 20 nt, synthetic construct
  source 1..20: mol_type = other RNA
tgtttctcgtcctgcatcct

SEQ ID NO: 13661 - RNA, 20 nt, synthetic construct
  source 1..20: mol_type = other RNA
tgtttgcagatagccaggag

SEQ ID NO: 13662 - RNA, 20 nt, synthetic construct
  source 1..20: mol_type = other RNA
tgtttgcccaggacagccta

SEQ ID NO: 13663 - RNA, 20 nt, synthetic construct
  source 1..20: mol_type = other RNA
tgttttcctaggactgaggg

SEQ ID NO: 13664 - RNA, 20 nt, synthetic construct
  source 1..20: mol_type = other RNA
tgttttcgtggctccctctg

SEQ ID NO: 13665 - RNA, 20 nt, synthetic construct
  source 1..20: mol_type = other RNA
tgtttttccaaactgcttct

SEQ ID NO: 13666 - RNA, 20 nt, synthetic construct
  source 1..20: mol_type = other RNA
ttaaacagccagtggccaga

SEQ ID NO: 13667 - RNA, 20 nt, synthetic construct
  source 1..20: mol_type = other RNA
ttaaacccagccaggtcctt

SEQ ID NO: 13668 - RNA, 20 nt, synthetic construct
  source 1..20: mol_type = other RNA
ttaaagagtccccagtgcta

SEQ ID NO: 13669 - RNA, 20 nt, synthetic construct
  source 1..20: mol_type = other RNA
ttaagatacgcctggttgcc

SEQ ID NO: 13670 - RNA, 20 nt, synthetic construct
  source 1..20: mol_type = other RNA
ttaaggaaagaaggatggag

SEQ ID NO: 13671 - RNA, 20 nt, synthetic construct
  source 1..20: mol_type = other RNA
ttaaggcaggaggggctggg

SEQ ID NO: 13672 - RNA, 20 nt, synthetic construct
  source 1..20: mol_type = other RNA
ttacacttcccaagaggaga

SEQ ID NO: 13673 - RNA, 20 nt, synthetic construct
  source 1..20: mol_type = other RNA
ttaccccccaagtccctcac

SEQ ID NO: 13674 - RNA, 20 nt, synthetic construct
  source 1..20: mol_type = other RNA
ttacctgtgagataaggcca

SEQ ID NO: 13675 - RNA, 20 nt, synthetic construct
  source 1..20: mol_type = other RNA
ttacgtggccaagaagcagg

SEQ ID NO: 13676 - RNA, 20 nt, synthetic construct
  source 1..20: mol_type = other RNA
ttagaactcaggaccaactt

SEQ ID NO: 13677 - RNA, 20 nt, synthetic construct
  source 1..20: mol_type = other RNA
ttagacacggcaaaaccccc

SEQ ID NO: 13678 - RNA, 20 nt, synthetic construct
  source 1..20: mol_type = other RNA
ttagcactgaaaccctcagt

SEQ ID NO: 13679 - RNA, 20 nt, synthetic construct
  source 1..20: mol_type = other RNA
ttagcttcactccttcctca

SEQ ID NO: 13680 - RNA, 20 nt, synthetic construct
  source 1..20: mol_type = other RNA
ttagggaagcgggaccctgc

SEQ ID NO: 13681 - RNA, 20 nt, synthetic construct
  source 1..20: mol_type = other RNA
ttagggaggcggggctgggc

SEQ ID NO: 13682 - RNA, 20 nt, synthetic construct
  source 1..20: mol_type = other RNA
ttagggctgaacagagaaga

SEQ ID NO: 13683 - RNA, 20 nt, synthetic construct
  source 1..20: mol_type = other RNA
ttaggggtccaaaacttggg

SEQ ID NO: 13684 - RNA, 20 nt, synthetic construct
  source 1..20: mol_type = other RNA
ttagggtaccccacgtgggt

SEQ ID NO: 13685 - RNA, 20 nt, synthetic construct
  source 1..20: mol_type = other RNA
ttagtggctagggggttggg

SEQ ID NO: 13686 - RNA, 20 nt, synthetic construct
  source 1..20: mol_type = other RNA
ttatattgttcctccgtgcg

SEQ ID NO: 13687 - RNA, 20 nt, synthetic construct
  source 1..20: mol_type = other RNA
ttatcaaccacttggtgagg

SEQ ID NO: 13688 - RNA, 20 nt, synthetic construct
  source 1..20: mol_type = other RNA
ttatcccgtggatctaggag

SEQ ID NO: 13689 - RNA, 20 nt, synthetic construct
  source 1..20: mol_type = other RNA
ttatctcacaggtaaaactg

SEQ ID NO: 13690 - RNA, 20 nt, synthetic construct
  source 1..20: mol_type = other RNA
ttatgctgtttgcccaggac

SEQ ID NO: 13691 - RNA, 20 nt, synthetic construct
  source 1..20: mol_type = other RNA
ttattctgattttgtttttc

SEQ ID NO: 13692 - RNA, 20 nt, synthetic construct
  source 1..20: mol_type = other RNA
ttatttccacccagttgtca

SEQ ID NO: 13693 - RNA, 20 nt, synthetic construct
  source 1..20: mol_type = other RNA
ttcaacccaggaggccaggc

SEQ ID NO: 13694 - RNA, 20 nt, synthetic construct
  source 1..20: mol_type = other RNA
ttcaaggacctgcccagtac

SEQ ID NO: 13695 - RNA, 20 nt, synthetic construct
  source 1..20: mol_type = other RNA
ttcacagcccgagtttccat

SEQ ID NO: 13696 - RNA, 20 nt, synthetic construct
  source 1..20: mol_type = other RNA
ttcacagggatgcctgtact

SEQ ID NO: 13697 - RNA, 20 nt, synthetic construct
  source 1..20: mol_type = other RNA
ttcaccaggtcgtggccgcc

SEQ ID NO: 13698 - RNA, 20 nt, synthetic construct
  source 1..20: mol_type = other RNA
ttcacctttctagtccccaa

SEQ ID NO: 13699 - RNA, 20 nt, synthetic construct
  source 1..20: mol_type = other RNA
ttcactccttcctcagctcc

SEQ ID NO: 13700 - RNA, 20 nt, synthetic construct
  source 1..20: mol_type = other RNA
ttcactgaggccccctctgc

SEQ ID NO: 13701 - RNA, 20 nt, synthetic construct
  source 1..20: mol_type = other RNA
ttcactgatcctggtgctgc

SEQ ID NO: 13702 - RNA, 20 nt, synthetic construct
  source 1..20: mol_type = other RNA
ttcacttcctgtttgcagat

SEQ ID NO: 13703 - RNA, 20 nt, synthetic construct
  source 1..20: mol_type = other RNA
ttcagacccaggggtccagg

SEQ ID NO: 13704 - RNA, 20 nt, synthetic construct
  source 1..20: mol_type = other RNA
ttcagactgagccccgttcc

SEQ ID NO: 13705 - RNA, 20 nt, synthetic construct
  source 1..20: mol_type = other RNA
ttcagagaggagggattccc

SEQ ID NO: 13706 - RNA, 20 nt, synthetic construct
  source 1..20: mol_type = other RNA
ttcagagccaggagtcctgg

SEQ ID NO: 13707 - RNA, 20 nt, synthetic construct
  source 1..20: mol_type = other RNA
ttcagccctaagaatcctgg

SEQ ID NO: 13708 - RNA, 20 nt, synthetic construct
  source 1..20: mol_type = other RNA
ttcaggtcccggagcccacc

SEQ ID NO: 13709 - RNA, 20 nt, synthetic construct
  source 1..20: mol_type = other RNA
ttcagtgctaaaactaggct

SEQ ID NO: 13710 - RNA, 20 nt, synthetic construct
  source 1..20: mol_type = other RNA
ttcagtgctcagtggaaacc

SEQ ID NO: 13711 - RNA, 20 nt, synthetic construct
  source 1..20: mol_type = other RNA
ttcatcccgttcccagggca

SEQ ID NO: 13712 - RNA, 20 nt, synthetic construct
  source 1..20: mol_type = other RNA
ttcatctgagggcggaaggg

SEQ ID NO: 13713 - RNA, 20 nt, synthetic construct
  source 1..20: mol_type = other RNA
ttccaaactgcttctcctct

SEQ ID NO: 13714 - RNA, 20 nt, synthetic construct
  source 1..20: mol_type = other RNA
ttccaagggtcaagctcgga

SEQ ID NO: 13715 - RNA, 20 nt, synthetic construct
  source 1..20: mol_type = other RNA
ttccacacggacacccccct

SEQ ID NO: 13716 - RNA, 20 nt, synthetic construct
  source 1..20: mol_type = other RNA
ttccacccagttgtcatggc

SEQ ID NO: 13717 - RNA, 20 nt, synthetic construct
  source 1..20: mol_type = other RNA
ttccactgagcactgaaggc

SEQ ID NO: 13718 - RNA, 20 nt, synthetic construct
  source 1..20: mol_type = other RNA
ttccagcccctcctccttca

SEQ ID NO: 13719 - RNA, 20 nt, synthetic construct
  source 1..20: mol_type = other RNA
ttccagtgctcagactaggg

SEQ ID NO: 13720 - RNA, 20 nt, synthetic construct
  source 1..20: mol_type = other RNA
ttccatgacctcatgctctt

SEQ ID NO: 13721 - RNA, 20 nt, synthetic construct
  source 1..20: mol_type = other RNA
ttcccaagaggagaagcagt

SEQ ID NO: 13722 - RNA, 20 nt, synthetic construct
  source 1..20: mol_type = other RNA
ttcccaagttcttagggtac

SEQ ID NO: 13723 - RNA, 20 nt, synthetic construct
  source 1..20: mol_type = other RNA
ttcccagggcacgtgcggcc

SEQ ID NO: 13724 - RNA, 20 nt, synthetic construct
  source 1..20: mol_type = other RNA
ttccccactgtcctagcacc

SEQ ID NO: 13725 - RNA, 20 nt, synthetic construct
  source 1..20: mol_type = other RNA
ttccccgttcacttcctgtt

SEQ ID NO: 13726 - RNA, 20 nt, synthetic construct
  source 1..20: mol_type = other RNA
ttcccctgcatcccccagag

SEQ ID NO: 13727 - RNA, 20 nt, synthetic construct
  source 1..20: mol_type = other RNA
ttcccctgcatcccccttcc

SEQ ID NO: 13728 - RNA, 20 nt, synthetic construct
  source 1..20: mol_type = other RNA
ttcccctgcatccccgttcc

SEQ ID NO: 13729 - RNA, 20 nt, synthetic construct
  source 1..20: mol_type = other RNA
ttcccgcacccagatgagaa

SEQ ID NO: 13730 - RNA, 20 nt, synthetic construct
  source 1..20: mol_type = other RNA
ttcccggccagtttctccac

SEQ ID NO: 13731 - RNA, 20 nt, synthetic construct
  source 1..20: mol_type = other RNA
ttccctaaggccctgctctg

SEQ ID NO: 13732 - RNA, 20 nt, synthetic construct
  source 1..20: mol_type = other RNA
ttccctacaggggttcctgg

SEQ ID NO: 13733 - RNA, 20 nt, synthetic construct
  source 1..20: mol_type = other RNA
ttccctagtctgagcactgg

SEQ ID NO: 13734 - RNA, 20 nt, synthetic construct
  source 1..20: mol_type = other RNA
ttccctgtcccccttcctcg

SEQ ID NO: 13735 - RNA, 20 nt, synthetic construct
  source 1..20: mol_type = other RNA
ttcccttaggggtccaaaac

SEQ ID NO: 13736 - RNA, 20 nt, synthetic construct
  source 1..20: mol_type = other RNA
ttcccttctcaggttacgtg

SEQ ID NO: 13737 - RNA, 20 nt, synthetic construct
  source 1..20: mol_type = other RNA
ttccctttcaaggacctgcc

SEQ ID NO: 13738 - RNA, 20 nt, synthetic construct
  source 1..20: mol_type = other RNA
ttccgagcttgacccttgga

SEQ ID NO: 13739 - RNA, 20 nt, synthetic construct
  source 1..20: mol_type = other RNA
ttccgccctcagatgaagga

SEQ ID NO: 13740 - RNA, 20 nt, synthetic construct
  source 1..20: mol_type = other RNA
ttcctaggactgagggtttc

SEQ ID NO: 13741 - RNA, 20 nt, synthetic construct
  source 1..20: mol_type = other RNA
ttcctcagctccagttcagg

SEQ ID NO: 13742 - RNA, 20 nt, synthetic construct
  source 1..20: mol_type = other RNA
ttcctccaccctgcatagcc

SEQ ID NO: 13743 - RNA, 20 nt, synthetic construct
  source 1..20: mol_type = other RNA
ttcctccgcccagagcaggg

SEQ ID NO: 13744 - RNA, 20 nt, synthetic construct
  source 1..20: mol_type = other RNA
ttcctccgtgcgtcagtttt

SEQ ID NO: 13745 - RNA, 20 nt, synthetic construct
  source 1..20: mol_type = other RNA
ttcctcgtccaccatctcat

SEQ ID NO: 13746 - RNA, 20 nt, synthetic construct
  source 1..20: mol_type = other RNA
ttcctgcaccccaattgcct

SEQ ID NO: 13747 - RNA, 20 nt, synthetic construct
  source 1..20: mol_type = other RNA
ttcctgcagagtatctgctg

SEQ ID NO: 13748 - RNA, 20 nt, synthetic construct
  source 1..20: mol_type = other RNA
ttcctggctctgctcttcag

SEQ ID NO: 13749 - RNA, 20 nt, synthetic construct
  source 1..20: mol_type = other RNA
ttcctgtttgcagatagcca

SEQ ID NO: 13750 - RNA, 20 nt, synthetic construct
  source 1..20: mol_type = other RNA
ttccttaaagagtccccagt

SEQ ID NO: 13751 - RNA, 20 nt, synthetic construct
  source 1..20: mol_type = other RNA
ttccttacacttcccaagag

SEQ ID NO: 13752 - RNA, 20 nt, synthetic construct
  source 1..20: mol_type = other RNA
ttcggcttttgtccccccaa

SEQ ID NO: 13753 - RNA, 20 nt, synthetic construct
  source 1..20: mol_type = other RNA
ttcggggtatcccaggaggc

SEQ ID NO: 13754 - RNA, 20 nt, synthetic construct
  source 1..20: mol_type = other RNA
ttcgtggctccctctggagt

SEQ ID NO: 13755 - RNA, 20 nt, synthetic construct
  source 1..20: mol_type = other RNA
ttcgtggtttccactgagca

SEQ ID NO: 13756 - RNA, 20 nt, synthetic construct
  source 1..20: mol_type = other RNA
ttcgttcctgcagagtatct

SEQ ID NO: 13757 - RNA, 20 nt, synthetic construct
  source 1..20: mol_type = other RNA
ttctaactttggctcttcac

SEQ ID NO: 13758 - RNA, 20 nt, synthetic construct
  source 1..20: mol_type = other RNA
ttctagtccccaatttatat

SEQ ID NO: 13759 - RNA, 20 nt, synthetic construct
  source 1..20: mol_type = other RNA
ttctcacaaagggagttttc

SEQ ID NO: 13760 - RNA, 20 nt, synthetic construct
  source 1..20: mol_type = other RNA
ttctcaggttacgtggccaa

SEQ ID NO: 13761 - RNA, 20 nt, synthetic construct
  source 1..20: mol_type = other RNA
ttctcagtggccaccctgcg

SEQ ID NO: 13762 - RNA, 20 nt, synthetic construct
  source 1..20: mol_type = other RNA
ttctcatctgggtgcgggaa

SEQ ID NO: 13763 - RNA, 20 nt, synthetic construct
  source 1..20: mol_type = other RNA
ttctcattcttcccttaggg

SEQ ID NO: 13764 - RNA, 20 nt, synthetic construct
  source 1..20: mol_type = other RNA
ttctccacctggggctgtgt

SEQ ID NO: 13765 - RNA, 20 nt, synthetic construct
  source 1..20: mol_type = other RNA
ttctccaggcaggtccccaa

SEQ ID NO: 13766 - RNA, 20 nt, synthetic construct
  source 1..20: mol_type = other RNA
ttctccatccttctttcctt

SEQ ID NO: 13767 - RNA, 20 nt, synthetic construct
  source 1..20: mol_type = other RNA
ttctcctccaactgtggggt

SEQ ID NO: 13768 - RNA, 20 nt, synthetic construct
  source 1..20: mol_type = other RNA
ttctcctcttgggaagtgta

SEQ ID NO: 13769 - RNA, 20 nt, synthetic construct
  source 1..20: mol_type = other RNA
ttctcgtcctgcatccttct

SEQ ID NO: 13770 - RNA, 20 nt, synthetic construct
  source 1..20: mol_type = other RNA
ttctctgttcagccctaaga

SEQ ID NO: 13771 - RNA, 20 nt, synthetic construct
  source 1..20: mol_type = other RNA
ttctctttctccatccttct

SEQ ID NO: 13772 - RNA, 20 nt, synthetic construct
  source 1..20: mol_type = other RNA
ttctgattttgtttttccaa

SEQ ID NO: 13773 - RNA, 20 nt, synthetic construct
  source 1..20: mol_type = other RNA
ttctgggagagggtagcgca

SEQ ID NO: 13774 - RNA, 20 nt, synthetic construct
  source 1..20: mol_type = other RNA
ttctgggtcttagggaggcg

SEQ ID NO: 13775 - RNA, 20 nt, synthetic construct
  source 1..20: mol_type = other RNA
ttctgggtttgagtccttgg

SEQ ID NO: 13776 - RNA, 20 nt, synthetic construct
  source 1..20: mol_type = other RNA
ttcttagggctgaacagaga

SEQ ID NO: 13777 - RNA, 20 nt, synthetic construct
  source 1..20: mol_type = other RNA
ttcttagggtaccccacgtg

SEQ ID NO: 13778 - RNA, 20 nt, synthetic construct
  source 1..20: mol_type = other RNA
ttcttcccttaggggtccaa

SEQ ID NO: 13779 - RNA, 20 nt, synthetic construct
  source 1..20: mol_type = other RNA
ttcttggccacgtaacctga

SEQ ID NO: 13780 - RNA, 20 nt, synthetic construct
  source 1..20: mol_type = other RNA
ttctttccttaaagagtccc

SEQ ID NO: 13781 - RNA, 20 nt, synthetic construct
  source 1..20: mol_type = other RNA
ttgaaagggaaaggcccatt

SEQ ID NO: 13782 - RNA, 20 nt, synthetic construct
  source 1..20: mol_type = other RNA
ttgaatggggaggggttggg

SEQ ID NO: 13783 - RNA, 20 nt, synthetic construct
  source 1..20: mol_type = other RNA
ttgacccttggaaggacctg

SEQ ID NO: 13784 - RNA, 20 nt, synthetic construct
  source 1..20: mol_type = other RNA
ttgagagaggaggggctggg

SEQ ID NO: 13785 - RNA, 20 nt, synthetic construct
  source 1..20: mol_type = other RNA
ttgagtccttggcaagccca

SEQ ID NO: 13786 - RNA, 20 nt, synthetic construct
  source 1..20: mol_type = other RNA
ttgataaacccacgtggggt

SEQ ID NO: 13787 - RNA, 20 nt, synthetic construct
  source 1..20: mol_type = other RNA
ttgattcccggccagtttct

SEQ ID NO: 13788 - RNA, 20 nt, synthetic construct
  source 1..20: mol_type = other RNA
ttgcagatagccaggagtcc

SEQ ID NO: 13789 - RNA, 20 nt, synthetic construct
  source 1..20: mol_type = other RNA
ttgccaagcagtcaccccac

SEQ ID NO: 13790 - RNA, 20 nt, synthetic construct
  source 1..20: mol_type = other RNA
ttgccaaggactcaaaccca

SEQ ID NO: 13791 - RNA, 20 nt, synthetic construct
  source 1..20: mol_type = other RNA
ttgcccaggacagcctagtt

SEQ ID NO: 13792 - RNA, 20 nt, synthetic construct
  source 1..20: mol_type = other RNA
ttgcccagtggtcaggccgg

SEQ ID NO: 13793 - RNA, 20 nt, synthetic construct
  source 1..20: mol_type = other RNA
ttgccccaggccttgtggac

SEQ ID NO: 13794 - RNA, 20 nt, synthetic construct
  source 1..20: mol_type = other RNA
ttgcccccctcccctatcgc

SEQ ID NO: 13795 - RNA, 20 nt, synthetic construct
  source 1..20: mol_type = other RNA
ttgccgtgtctaacaggtac

SEQ ID NO: 13796 - RNA, 20 nt, synthetic construct
  source 1..20: mol_type = other RNA
ttgccttagtggctaggggg

SEQ ID NO: 13797 - RNA, 20 nt, synthetic construct
  source 1..20: mol_type = other RNA
ttgctctccttgcccccctc

SEQ ID NO: 13798 - RNA, 20 nt, synthetic construct
  source 1..20: mol_type = other RNA
ttggaaaaacaaaatcagaa

SEQ ID NO: 13799 - RNA, 20 nt, synthetic construct
  source 1..20: mol_type = other RNA
ttggaaggacctggctgggt

SEQ ID NO: 13800 - RNA, 20 nt, synthetic construct
  source 1..20: mol_type = other RNA
ttggacccctaagggaagaa

SEQ ID NO: 13801 - RNA, 20 nt, synthetic construct
  source 1..20: mol_type = other RNA
ttggagaggtgagggacttg

SEQ ID NO: 13802 - RNA, 20 nt, synthetic construct
  source 1..20: mol_type = other RNA
ttggaggagaatccacccaa

SEQ ID NO: 13803 - RNA, 20 nt, synthetic construct
  source 1..20: mol_type = other RNA
ttggcaaactcactcttcgg

SEQ ID NO: 13804 - RNA, 20 nt, synthetic construct
  source 1..20: mol_type = other RNA
ttggcaagcccaggagaggc

SEQ ID NO: 13805 - RNA, 20 nt, synthetic construct
  source 1..20: mol_type = other RNA
ttggccacgtaacctgagaa

SEQ ID NO: 13806 - RNA, 20 nt, synthetic construct
  source 1..20: mol_type = other RNA
ttggccctcgtagctccctc

SEQ ID NO: 13807 - RNA, 20 nt, synthetic construct
  source 1..20: mol_type = other RNA
ttggcctggaccccacgaga

SEQ ID NO: 13808 - RNA, 20 nt, synthetic construct
  source 1..20: mol_type = other RNA
ttggctcttcacctttctag

SEQ ID NO: 13809 - RNA, 20 nt, synthetic construct
  source 1..20: mol_type = other RNA
ttgggaacagccacagcagg

SEQ ID NO: 13810 - RNA, 20 nt, synthetic construct
  source 1..20: mol_type = other RNA
ttgggaagtgtaaggaagct

SEQ ID NO: 13811 - RNA, 20 nt, synthetic construct
  source 1..20: mol_type = other RNA
ttgggcctggactctggagt

SEQ ID NO: 13812 - RNA, 20 nt, synthetic construct
  source 1..20: mol_type = other RNA
ttggggacctgcctggagaa

SEQ ID NO: 13813 - RNA, 20 nt, synthetic construct
  source 1..20: mol_type = other RNA
ttggggactagaaaggtgaa

SEQ ID NO: 13814 - RNA, 20 nt, synthetic construct
  source 1..20: mol_type = other RNA
ttgggggctagagtaggagg

SEQ ID NO: 13815 - RNA, 20 nt, synthetic construct
  source 1..20: mol_type = other RNA
ttggggggacaaaagccgaa

SEQ ID NO: 13816 - RNA, 20 nt, synthetic construct
  source 1..20: mol_type = other RNA
ttggggggtaatttatcccg

SEQ ID NO: 13817 - RNA, 20 nt, synthetic construct
  source 1..20: mol_type = other RNA
ttggggtgcaggaatggggg

SEQ ID NO: 13818 - RNA, 20 nt, synthetic construct
  source 1..20: mol_type = other RNA
ttggggtgggctggggttca

SEQ ID NO: 13819 - RNA, 20 nt, synthetic construct
  source 1..20: mol_type = other RNA
ttgggtcaggtctgggtgtg

SEQ ID NO: 13820 - RNA, 20 nt, synthetic construct
  source 1..20: mol_type = other RNA
ttgggtcattttccccactg

SEQ ID NO: 13821 - RNA, 20 nt, synthetic construct
  source 1..20: mol_type = other RNA
ttgggtggattctcctccaa

SEQ ID NO: 13822 - RNA, 20 nt, synthetic construct
  source 1..20: mol_type = other RNA
ttggtcactgtctctgggtg

SEQ ID NO: 13823 - RNA, 20 nt, synthetic construct
  source 1..20: mol_type = other RNA
ttggtcctgagttctaactt

SEQ ID NO: 13824 - RNA, 20 nt, synthetic construct
  source 1..20: mol_type = other RNA
ttggtgaggctggtaccctg

SEQ ID NO: 13825 - RNA, 20 nt, synthetic construct
  source 1..20: mol_type = other RNA
ttgtcatggcgataggggag

SEQ ID NO: 13826 - RNA, 20 nt, synthetic construct
  source 1..20: mol_type = other RNA
ttgtccccccaagttttgga

SEQ ID NO: 13827 - RNA, 20 nt, synthetic construct
  source 1..20: mol_type = other RNA
ttgtgagaatggtgcgtcct

SEQ ID NO: 13828 - RNA, 20 nt, synthetic construct
  source 1..20: mol_type = other RNA
ttgtggacactgggtgggct

SEQ ID NO: 13829 - RNA, 20 nt, synthetic construct
  source 1..20: mol_type = other RNA
ttgttcctccgtgcgtcagt

SEQ ID NO: 13830 - RNA, 20 nt, synthetic construct
  source 1..20: mol_type = other RNA
ttgtttttccaaactgcttc

SEQ ID NO: 13831 - RNA, 20 nt, synthetic construct
  source 1..20: mol_type = other RNA
tttaagatacgcctggttgc

SEQ ID NO: 13832 - RNA, 20 nt, synthetic construct
  source 1..20: mol_type = other RNA
tttaaggaaagaaggatgga

SEQ ID NO: 13833 - RNA, 20 nt, synthetic construct
  source 1..20: mol_type = other RNA
tttaaggcaggaggggctgg

SEQ ID NO: 13834 - RNA, 20 nt, synthetic construct
  source 1..20: mol_type = other RNA
tttacctgtgagataaggcc

SEQ ID NO: 13835 - RNA, 20 nt, synthetic construct
  source 1..20: mol_type = other RNA
tttagcactgaaaccctcag

SEQ ID NO: 13836 - RNA, 20 nt, synthetic construct
  source 1..20: mol_type = other RNA
tttagcttcactccttcctc

SEQ ID NO: 13837 - RNA, 20 nt, synthetic construct
  source 1..20: mol_type = other RNA
tttatattgttcctccgtgc

SEQ ID NO: 13838 - RNA, 20 nt, synthetic construct
  source 1..20: mol_type = other RNA
tttatcaaccacttggtgag

SEQ ID NO: 13839 - RNA, 20 nt, synthetic construct
  source 1..20: mol_type = other RNA
tttatcccgtggatctagga

SEQ ID NO: 13840 - RNA, 20 nt, synthetic construct
  source 1..20: mol_type = other RNA
tttatttccacccagttgtc

SEQ ID NO: 13841 - RNA, 20 nt, synthetic construct
  source 1..20: mol_type = other RNA
tttcaaggacctgcccagta

SEQ ID NO: 13842 - RNA, 20 nt, synthetic construct
  source 1..20: mol_type = other RNA
tttcacagggatgcctgtac

SEQ ID NO: 13843 - RNA, 20 nt, synthetic construct
  source 1..20: mol_type = other RNA
tttcactgatcctggtgctg

SEQ ID NO: 13844 - RNA, 20 nt, synthetic construct
  source 1..20: mol_type = other RNA
tttcagtgctaaaactaggc

SEQ ID NO: 13845 - RNA, 20 nt, synthetic construct
  source 1..20: mol_type = other RNA
tttccaaactgcttctcctc

SEQ ID NO: 13846 - RNA, 20 nt, synthetic construct
  source 1..20: mol_type = other RNA
tttccacacggacacccccc

SEQ ID NO: 13847 - RNA, 20 nt, synthetic construct
  source 1..20: mol_type = other RNA
tttccacccagttgtcatgg

SEQ ID NO: 13848 - RNA, 20 nt, synthetic construct
  source 1..20: mol_type = other RNA
tttccactgagcactgaagg

SEQ ID NO: 13849 - RNA, 20 nt, synthetic construct
  source 1..20: mol_type = other RNA
tttccatgacctcatgctct

SEQ ID NO: 13850 - RNA, 20 nt, synthetic construct
  source 1..20: mol_type = other RNA
tttccccactgtcctagcac

SEQ ID NO: 13851 - RNA, 20 nt, synthetic construct
  source 1..20: mol_type = other RNA
tttccctttcaaggacctgc

SEQ ID NO: 13852 - RNA, 20 nt, synthetic construct
  source 1..20: mol_type = other RNA
tttccgagcttgacccttgg

SEQ ID NO: 13853 - RNA, 20 nt, synthetic construct
  source 1..20: mol_type = other RNA
tttcctaggactgagggttt

SEQ ID NO: 13854 - RNA, 20 nt, synthetic construct
  source 1..20: mol_type = other RNA
tttccttaaagagtccccag

SEQ ID NO: 13855 - RNA, 20 nt, synthetic construct
  source 1..20: mol_type = other RNA
tttcgtggctccctctggag

SEQ ID NO: 13856 - RNA, 20 nt, synthetic construct
  source 1..20: mol_type = other RNA
tttcgtggtttccactgagc

SEQ ID NO: 13857 - RNA, 20 nt, synthetic construct
  source 1..20: mol_type = other RNA
tttctagtccccaatttata

SEQ ID NO: 13858 - RNA, 20 nt, synthetic construct
  source 1..20: mol_type = other RNA
tttctcattcttcccttagg

SEQ ID NO: 13859 - RNA, 20 nt, synthetic construct
  source 1..20: mol_type = other RNA
tttctccacctggggctgtg

SEQ ID NO: 13860 - RNA, 20 nt, synthetic construct
  source 1..20: mol_type = other RNA
tttctccatccttctttcct

SEQ ID NO: 13861 - RNA, 20 nt, synthetic construct
  source 1..20: mol_type = other RNA
tttctcgtcctgcatccttc

SEQ ID NO: 13862 - RNA, 20 nt, synthetic construct
  source 1..20: mol_type = other RNA
tttctctttctccatccttc

SEQ ID NO: 13863 - RNA, 20 nt, synthetic construct
  source 1..20: mol_type = other RNA
tttgagagaggaggggctgg

SEQ ID NO: 13864 - RNA, 20 nt, synthetic construct
  source 1..20: mol_type = other RNA
tttgagtccttggcaagccc

SEQ ID NO: 13865 - RNA, 20 nt, synthetic construct
  source 1..20: mol_type = other RNA
tttgcagatagccaggagtc

SEQ ID NO: 13866 - RNA, 20 nt, synthetic construct
  source 1..20: mol_type = other RNA
tttgccaagcagtcacccca

SEQ ID NO: 13867 - RNA, 20 nt, synthetic construct
  source 1..20: mol_type = other RNA
tttgcccaggacagcctagt

SEQ ID NO: 13868 - RNA, 20 nt, synthetic construct
  source 1..20: mol_type = other RNA
tttgccgtgtctaacaggta

SEQ ID NO: 13869 - RNA, 20 nt, synthetic construct
  source 1..20: mol_type = other RNA
tttggaaaaacaaaatcaga

SEQ ID NO: 13870 - RNA, 20 nt, synthetic construct
  source 1..20: mol_type = other RNA
tttggacccctaagggaaga

SEQ ID NO: 13871 - RNA, 20 nt, synthetic construct
  source 1..20: mol_type = other RNA
tttggagaggtgagggactt

SEQ ID NO: 13872 - RNA, 20 nt, synthetic construct
  source 1..20: mol_type = other RNA
tttggctcttcacctttcta

SEQ ID NO: 13873 - RNA, 20 nt, synthetic construct
  source 1..20: mol_type = other RNA
tttgggtcaggtctgggtgt

SEQ ID NO: 13874 - RNA, 20 nt, synthetic construct
  source 1..20: mol_type = other RNA
tttgggtggattctcctcca

SEQ ID NO: 13875 - RNA, 20 nt, synthetic construct
  source 1..20: mol_type = other RNA
tttgtccccccaagttttgg

SEQ ID NO: 13876 - RNA, 20 nt, synthetic construct
  source 1..20: mol_type = other RNA
tttgtgagaatggtgcgtcc

SEQ ID NO: 13877 - RNA, 20 nt, synthetic construct
  source 1..20: mol_type = other RNA
tttgtttttccaaactgctt

SEQ ID NO: 13878 - RNA, 20 nt, synthetic construct
  source 1..20: mol_type = other RNA
ttttacctgtgagataaggc

SEQ ID NO: 13879 - RNA, 20 nt, synthetic construct
  source 1..20: mol_type = other RNA
ttttagcactgaaaccctca

SEQ ID NO: 13880 - RNA, 20 nt, synthetic construct
  source 1..20: mol_type = other RNA
ttttccaaactgcttctcct

SEQ ID NO: 13881 - RNA, 20 nt, synthetic construct
  source 1..20: mol_type = other RNA
ttttccacacggacaccccc

SEQ ID NO: 13882 - RNA, 20 nt, synthetic construct
  source 1..20: mol_type = other RNA
ttttccccactgtcctagca

SEQ ID NO: 13883 - RNA, 20 nt, synthetic construct
  source 1..20: mol_type = other RNA
ttttcctaggactgagggtt

SEQ ID NO: 13884 - RNA, 20 nt, synthetic construct
  source 1..20: mol_type = other RNA
ttttcgtggctccctctgga

SEQ ID NO: 13885 - RNA, 20 nt, synthetic construct
  source 1..20: mol_type = other RNA
ttttgccgtgtctaacaggt

SEQ ID NO: 13886 - RNA, 20 nt, synthetic construct
  source 1..20: mol_type = other RNA
ttttggacccctaagggaag

SEQ ID NO: 13887 - RNA, 20 nt, synthetic construct
  source 1..20: mol_type = other RNA
ttttgggtggattctcctcc

SEQ ID NO: 13888 - RNA, 20 nt, synthetic construct
  source 1..20: mol_type = other RNA
ttttgtccccccaagttttg

SEQ ID NO: 13889 - RNA, 20 nt, synthetic construct
  source 1..20: mol_type = other RNA
ttttgtttttccaaactgct

SEQ ID NO: 13890 - RNA, 20 nt, synthetic construct
  source 1..20: mol_type = other RNA
tttttccaaactgcttctcc

SEQ ID NO: 13891 - RNA, 21 nt, synthetic construct
  source 1..21: mol_type = other RNA
aaaaacaaaatcagaataagt

SEQ ID NO: 13892 - RNA, 21 nt, synthetic construct
  source 1..21: mol_type = other RNA
aaaacaaaatcagaataagtt

SEQ ID NO: 13893 - RNA, 21 nt, synthetic construct
  source 1..21: mol_type = other RNA
aaaacagatccagggacacgg

SEQ ID NO: 13894 - RNA, 21 nt, synthetic construct
  source 1..21: mol_type = other RNA
aaaacagggatggttggtcac

SEQ ID NO: 13895 - RNA, 21 nt, synthetic construct
  source 1..21: mol_type = other RNA
aaaacccccgtcaccacccac

SEQ ID NO: 13896 - RNA, 21 nt, synthetic construct
  source 1..21: mol_type = other RNA
aaaactaggctgtcctgggca

SEQ ID NO: 13897 - RNA, 21 nt, synthetic construct
  source 1..21: mol_type = other RNA
aaaactccctttgtgagaatg

SEQ ID NO: 13898 - RNA, 21 nt, synthetic construct
  source 1..21: mol_type = other RNA
aaaactgacgcacggaggaac

SEQ ID NO: 13899 - RNA, 21 nt, synthetic construct
  source 1..21: mol_type = other RNA
aaaacttggggggacaaaagc

SEQ ID NO: 13900 - RNA, 21 nt, synthetic construct
  source 1..21: mol_type = other RNA
aaaagccgaagtccagggggt

SEQ ID NO: 13901 - RNA, 21 nt, synthetic construct
  source 1..21: mol_type = other RNA
aaaaggcagcctggtagacag

SEQ ID NO: 13902 - RNA, 21 nt, synthetic construct
  source 1..21: mol_type = other RNA
aaaatcagaataagttggtcc

SEQ ID NO: 13903 - RNA, 21 nt, synthetic construct
  source 1..21: mol_type = other RNA
aaaatgacccaacagcctctg

SEQ ID NO: 13904 - RNA, 21 nt, synthetic construct
  source 1..21: mol_type = other RNA
aaacaaaatcagaataagttg

SEQ ID NO: 13905 - RNA, 21 nt, synthetic construct
  source 1..21: mol_type = other RNA
aaacacagccccaggtggaga

SEQ ID NO: 13906 - RNA, 21 nt, synthetic construct
  source 1..21: mol_type = other RNA
aaacagatccagggacacggt

SEQ ID NO: 13907 - RNA, 21 nt, synthetic construct
  source 1..21: mol_type = other RNA
aaacagcataagctggtcacc

SEQ ID NO: 13908 - RNA, 21 nt, synthetic construct
  source 1..21: mol_type = other RNA
aaacagccagtggccagaggc

SEQ ID NO: 13909 - RNA, 21 nt, synthetic construct
  source 1..21: mol_type = other RNA
aaacaggaagtgaacggggaa

SEQ ID NO: 13910 - RNA, 21 nt, synthetic construct
  source 1..21: mol_type = other RNA
aaacagggatggttggtcact

SEQ ID NO: 13911 - RNA, 21 nt, synthetic construct
  source 1..21: mol_type = other RNA
aaaccaccccagcagatactc

SEQ ID NO: 13912 - RNA, 21 nt, synthetic construct
  source 1..21: mol_type = other RNA
aaaccacgaaaggactcctgg

SEQ ID NO: 13913 - RNA, 21 nt, synthetic construct
  source 1..21: mol_type = other RNA
aaacccacgtggggtacccta

SEQ ID NO: 13914 - RNA, 21 nt, synthetic construct
  source 1..21: mol_type = other RNA
aaacccagaagcccagagcag

SEQ ID NO: 13915 - RNA, 21 nt, synthetic construct
  source 1..21: mol_type = other RNA
aaacccagccaggtccttcca

SEQ ID NO: 13916 - RNA, 21 nt, synthetic construct
  source 1..21: mol_type = other RNA
aaacccagctcccctgcttct

SEQ ID NO: 13917 - RNA, 21 nt, synthetic construct
  source 1..21: mol_type = other RNA
aaacccaggagcccaggcccc

SEQ ID NO: 13918 - RNA, 21 nt, synthetic construct
  source 1..21: mol_type = other RNA
aaacccccgtcaccacccaca

SEQ ID NO: 13919 - RNA, 21 nt, synthetic construct
  source 1..21: mol_type = other RNA
aaaccctcagtcctaggaaaa

SEQ ID NO: 13920 - RNA, 21 nt, synthetic construct
  source 1..21: mol_type = other RNA
aaacgagccgagttcatcccg

SEQ ID NO: 13921 - RNA, 21 nt, synthetic construct
  source 1..21: mol_type = other RNA
aaacgcaccagacggccgcgt

SEQ ID NO: 13922 - RNA, 21 nt, synthetic construct
  source 1..21: mol_type = other RNA
aaacggtggcccgtgtcagcc

SEQ ID NO: 13923 - RNA, 21 nt, synthetic construct
  source 1..21: mol_type = other RNA
aaactaggctgtcctgggcaa

SEQ ID NO: 13924 - RNA, 21 nt, synthetic construct
  source 1..21: mol_type = other RNA
aaactcactcttcggggtatc

SEQ ID NO: 13925 - RNA, 21 nt, synthetic construct
  source 1..21: mol_type = other RNA
aaactccctttgtgagaatgg

SEQ ID NO: 13926 - RNA, 21 nt, synthetic construct
  source 1..21: mol_type = other RNA
aaactcctagatccacgggat

SEQ ID NO: 13927 - RNA, 21 nt, synthetic construct
  source 1..21: mol_type = other RNA
aaactcgggctgtgaaggggc

SEQ ID NO: 13928 - RNA, 21 nt, synthetic construct
  source 1..21: mol_type = other RNA
aaactgacgcacggaggaaca

SEQ ID NO: 13929 - RNA, 21 nt, synthetic construct
  source 1..21: mol_type = other RNA
aaactgcttctcctcttggga

SEQ ID NO: 13930 - RNA, 21 nt, synthetic construct
  source 1..21: mol_type = other RNA
aaactggccgggaatcaagag

SEQ ID NO: 13931 - RNA, 21 nt, synthetic construct
  source 1..21: mol_type = other RNA
aaacttggggggacaaaagcc

SEQ ID NO: 13932 - RNA, 21 nt, synthetic construct
  source 1..21: mol_type = other RNA
aaagaaggatggagaaagaga

SEQ ID NO: 13933 - RNA, 21 nt, synthetic construct
  source 1..21: mol_type = other RNA
aaagagaaagggagtagaggc

SEQ ID NO: 13934 - RNA, 21 nt, synthetic construct
  source 1..21: mol_type = other RNA
aaagagtccccagtgctatct

SEQ ID NO: 13935 - RNA, 21 nt, synthetic construct
  source 1..21: mol_type = other RNA
aaagatgcctgaggcctgggc

SEQ ID NO: 13936 - RNA, 21 nt, synthetic construct
  source 1..21: mol_type = other RNA
aaagccgaagtccagggggtc

SEQ ID NO: 13937 - RNA, 21 nt, synthetic construct
  source 1..21: mol_type = other RNA
aaagctgcccatctggaggag

SEQ ID NO: 13938 - RNA, 21 nt, synthetic construct
  source 1..21: mol_type = other RNA
aaaggactcctggctatctgc

SEQ ID NO: 13939 - RNA, 21 nt, synthetic construct
  source 1..21: mol_type = other RNA
aaaggcagcctggtagacagg

SEQ ID NO: 13940 - RNA, 21 nt, synthetic construct
  source 1..21: mol_type = other RNA
aaaggcccattgctctccttg

SEQ ID NO: 13941 - RNA, 21 nt, synthetic construct
  source 1..21: mol_type = other RNA
aaagggaaaggcccattgctc

SEQ ID NO: 13942 - RNA, 21 nt, synthetic construct
  source 1..21: mol_type = other RNA
aaagggagtagaggcggccac

SEQ ID NO: 13943 - RNA, 21 nt, synthetic construct
  source 1..21: mol_type = other RNA
aaagggagttttccacacgga

SEQ ID NO: 13944 - RNA, 21 nt, synthetic construct
  source 1..21: mol_type = other RNA
aaaggtgaagagccaaagtta

SEQ ID NO: 13945 - RNA, 21 nt, synthetic construct
  source 1..21: mol_type = other RNA
aaagttagaactcaggaccaa

SEQ ID NO: 13946 - RNA, 21 nt, synthetic construct
  source 1..21: mol_type = other RNA
aaataaacgagccgagttcat

SEQ ID NO: 13947 - RNA, 21 nt, synthetic construct
  source 1..21: mol_type = other RNA
aaatcagaataagttggtcct

SEQ ID NO: 13948 - RNA, 21 nt, synthetic construct
  source 1..21: mol_type = other RNA
aaatgacccaacagcctctgg

SEQ ID NO: 13949 - RNA, 21 nt, synthetic construct
  source 1..21: mol_type = other RNA
aaattaccccccaagtccctc

SEQ ID NO: 13950 - RNA, 21 nt, synthetic construct
  source 1..21: mol_type = other RNA
aaattggggactagaaaggtg

SEQ ID NO: 13951 - RNA, 21 nt, synthetic construct
  source 1..21: mol_type = other RNA
aacaaaatcagaataagttgg

SEQ ID NO: 13952 - RNA, 21 nt, synthetic construct
  source 1..21: mol_type = other RNA
aacaatataaattggggacta

SEQ ID NO: 13953 - RNA, 21 nt, synthetic construct
  source 1..21: mol_type = other RNA
aacacagccccaggtggagaa

SEQ ID NO: 13954 - RNA, 21 nt, synthetic construct
  source 1..21: mol_type = other RNA
aacacctaggacgcaccattc

SEQ ID NO: 13955 - RNA, 21 nt, synthetic construct
  source 1..21: mol_type = other RNA
aacagagaagagctgggggcc

SEQ ID NO: 13956 - RNA, 21 nt, synthetic construct
  source 1..21: mol_type = other RNA
aacagatccagggacacggtg

SEQ ID NO: 13957 - RNA, 21 nt, synthetic construct
  source 1..21: mol_type = other RNA
aacagcataagctggtcaccc

SEQ ID NO: 13958 - RNA, 21 nt, synthetic construct
  source 1..21: mol_type = other RNA
aacagccacagcaggggggcg

SEQ ID NO: 13959 - RNA, 21 nt, synthetic construct
  source 1..21: mol_type = other RNA
aacagccagtggccagaggct

SEQ ID NO: 13960 - RNA, 21 nt, synthetic construct
  source 1..21: mol_type = other RNA
aacagcctctggccactggct

SEQ ID NO: 13961 - RNA, 21 nt, synthetic construct
  source 1..21: mol_type = other RNA
aacaggaagtgaacggggaag

SEQ ID NO: 13962 - RNA, 21 nt, synthetic construct
  source 1..21: mol_type = other RNA
aacagggatggttggtcactg

SEQ ID NO: 13963 - RNA, 21 nt, synthetic construct
  source 1..21: mol_type = other RNA
aacaggtaccatgtggggttc

SEQ ID NO: 13964 - RNA, 21 nt, synthetic construct
  source 1..21: mol_type = other RNA
aaccaccccagcagatactct

SEQ ID NO: 13965 - RNA, 21 nt, synthetic construct
  source 1..21: mol_type = other RNA
aaccacgaaaggactcctggc

SEQ ID NO: 13966 - RNA, 21 nt, synthetic construct
  source 1..21: mol_type = other RNA
aaccacttggtgaggctggta

SEQ ID NO: 13967 - RNA, 21 nt, synthetic construct
  source 1..21: mol_type = other RNA
aaccaggcgtatcttaaacag

SEQ ID NO: 13968 - RNA, 21 nt, synthetic construct
  source 1..21: mol_type = other RNA
aaccatccctgttttcctagg

SEQ ID NO: 13969 - RNA, 21 nt, synthetic construct
  source 1..21: mol_type = other RNA
aacccacgtggggtaccctaa

SEQ ID NO: 13970 - RNA, 21 nt, synthetic construct
  source 1..21: mol_type = other RNA
aacccagaagcccagagcagg

SEQ ID NO: 13971 - RNA, 21 nt, synthetic construct
  source 1..21: mol_type = other RNA
aacccagccaggtccttccaa

SEQ ID NO: 13972 - RNA, 21 nt, synthetic construct
  source 1..21: mol_type = other RNA
aacccagctcccctgcttctt

SEQ ID NO: 13973 - RNA, 21 nt, synthetic construct
  source 1..21: mol_type = other RNA
aacccaggagcccaggccccc

SEQ ID NO: 13974 - RNA, 21 nt, synthetic construct
  source 1..21: mol_type = other RNA
aacccaggaggccaggcccca

SEQ ID NO: 13975 - RNA, 21 nt, synthetic construct
  source 1..21: mol_type = other RNA
aaccccacatggtacctgtta

SEQ ID NO: 13976 - RNA, 21 nt, synthetic construct
  source 1..21: mol_type = other RNA
aaccccagcccaccccaatgc

SEQ ID NO: 13977 - RNA, 21 nt, synthetic construct
  source 1..21: mol_type = other RNA
aacccccgtcaccacccacag

SEQ ID NO: 13978 - RNA, 21 nt, synthetic construct
  source 1..21: mol_type = other RNA
aaccccctagccactaaggca

SEQ ID NO: 13979 - RNA, 21 nt, synthetic construct
  source 1..21: mol_type = other RNA
aacccctccccattcaaccca

SEQ ID NO: 13980 - RNA, 21 nt, synthetic construct
  source 1..21: mol_type = other RNA
aacccctgtagggaaggggca

SEQ ID NO: 13981 - RNA, 21 nt, synthetic construct
  source 1..21: mol_type = other RNA
aaccctcagtcctaggaaaac

SEQ ID NO: 13982 - RNA, 21 nt, synthetic construct
  source 1..21: mol_type = other RNA
aacctcttccctagtctgagc

SEQ ID NO: 13983 - RNA, 21 nt, synthetic construct
  source 1..21: mol_type = other RNA
aacctgagaagggaatccctc

SEQ ID NO: 13984 - RNA, 21 nt, synthetic construct
  source 1..21: mol_type = other RNA
aacctgagctgctctgacgcg

SEQ ID NO: 13985 - RNA, 21 nt, synthetic construct
  source 1..21: mol_type = other RNA
aacgaagccgtgggcccaggg

SEQ ID NO: 13986 - RNA, 21 nt, synthetic construct
  source 1..21: mol_type = other RNA
aacgagccgagttcatcccgt

SEQ ID NO: 13987 - RNA, 21 nt, synthetic construct
  source 1..21: mol_type = other RNA
aacgcaccagacggccgcgtc

SEQ ID NO: 13988 - RNA, 21 nt, synthetic construct
  source 1..21: mol_type = other RNA
aacgggatgaactcggctcgt

SEQ ID NO: 13989 - RNA, 21 nt, synthetic construct
  source 1..21: mol_type = other RNA
aacggggaagggagggggctt

SEQ ID NO: 13990 - RNA, 21 nt, synthetic construct
  source 1..21: mol_type = other RNA
aacggggatgcaggggaacgg

SEQ ID NO: 13991 - RNA, 21 nt, synthetic construct
  source 1..21: mol_type = other RNA
aacggggctcagtctgaagag

SEQ ID NO: 13992 - RNA, 21 nt, synthetic construct
  source 1..21: mol_type = other RNA
aacggtggcccgtgtcagccc

SEQ ID NO: 13993 - RNA, 21 nt, synthetic construct
  source 1..21: mol_type = other RNA
aactaggctgtcctgggcaaa

SEQ ID NO: 13994 - RNA, 21 nt, synthetic construct
  source 1..21: mol_type = other RNA
aactcactcttcggggtatcc

SEQ ID NO: 13995 - RNA, 21 nt, synthetic construct
  source 1..21: mol_type = other RNA
aactcaggaccaacttattct

SEQ ID NO: 13996 - RNA, 21 nt, synthetic construct
  source 1..21: mol_type = other RNA
aactccctttgtgagaatggt

SEQ ID NO: 13997 - RNA, 21 nt, synthetic construct
  source 1..21: mol_type = other RNA
aactcctagatccacgggata

SEQ ID NO: 13998 - RNA, 21 nt, synthetic construct
  source 1..21: mol_type = other RNA
aactcggctcgtttatttcca

SEQ ID NO: 13999 - RNA, 21 nt, synthetic construct
  source 1..21: mol_type = other RNA
aactcgggctgtgaaggggcc

SEQ ID NO: 14000 - RNA, 21 nt, synthetic construct
  source 1..21: mol_type = other RNA
aactgacgcacggaggaacaa

SEQ ID NO: 14001 - RNA, 21 nt, synthetic construct
  source 1..21: mol_type = other RNA
aactgcttctcctcttgggaa

SEQ ID NO: 14002 - RNA, 21 nt, synthetic construct
  source 1..21: mol_type = other RNA
aactggagctgaggaaggagt

SEQ ID NO: 14003 - RNA, 21 nt, synthetic construct
  source 1..21: mol_type = other RNA
aactggagtgtgacagcctgg

SEQ ID NO: 14004 - RNA, 21 nt, synthetic construct
  source 1..21: mol_type = other RNA
aactggccgggaatcaagagt

SEQ ID NO: 14005 - RNA, 21 nt, synthetic construct
  source 1..21: mol_type = other RNA
aactgggtggaaataaacgag

SEQ ID NO: 14006 - RNA, 21 nt, synthetic construct
  source 1..21: mol_type = other RNA
aactgtggggtgactgcttgg

SEQ ID NO: 14007 - RNA, 21 nt, synthetic construct
  source 1..21: mol_type = other RNA
aacttgggaacagccacagca

SEQ ID NO: 14008 - RNA, 21 nt, synthetic construct
  source 1..21: mol_type = other RNA
aacttggggggacaaaagccg

SEQ ID NO: 14009 - RNA, 21 nt, synthetic construct
  source 1..21: mol_type = other RNA
aactttggctcttcacctttc

SEQ ID NO: 14010 - RNA, 21 nt, synthetic construct
  source 1..21: mol_type = other RNA
aagaacttgggaacagccaca

SEQ ID NO: 14011 - RNA, 21 nt, synthetic construct
  source 1..21: mol_type = other RNA
aagaagcaggggagctgggtt

SEQ ID NO: 14012 - RNA, 21 nt, synthetic construct
  source 1..21: mol_type = other RNA
aagaaggatggagaaagagaa

SEQ ID NO: 14013 - RNA, 21 nt, synthetic construct
  source 1..21: mol_type = other RNA
aagaatcctggctccagcccc

SEQ ID NO: 14014 - RNA, 21 nt, synthetic construct
  source 1..21: mol_type = other RNA
aagaatgagaaacggtggccc

SEQ ID NO: 14015 - RNA, 21 nt, synthetic construct
  source 1..21: mol_type = other RNA
aagacccagaagtccaggccc

SEQ ID NO: 14016 - RNA, 21 nt, synthetic construct
  source 1..21: mol_type = other RNA
aagagaaagggagtagaggcg

SEQ ID NO: 14017 - RNA, 21 nt, synthetic construct
  source 1..21: mol_type = other RNA
aagagcagagccaggaacccc

SEQ ID NO: 14018 - RNA, 21 nt, synthetic construct
  source 1..21: mol_type = other RNA
aagagcatgaggtcatggaaa

SEQ ID NO: 14019 - RNA, 21 nt, synthetic construct
  source 1..21: mol_type = other RNA
aagagccaaagttagaactca

SEQ ID NO: 14020 - RNA, 21 nt, synthetic construct
  source 1..21: mol_type = other RNA
aagagctgggggcctgggctc

SEQ ID NO: 14021 - RNA, 21 nt, synthetic construct
  source 1..21: mol_type = other RNA
aagaggagaagcagtttggaa

SEQ ID NO: 14022 - RNA, 21 nt, synthetic construct
  source 1..21: mol_type = other RNA
aagaggttccagcccctcctc

SEQ ID NO: 14023 - RNA, 21 nt, synthetic construct
  source 1..21: mol_type = other RNA
aagagtcacccagagacagtg

SEQ ID NO: 14024 - RNA, 21 nt, synthetic construct
  source 1..21: mol_type = other RNA
aagagtccccagtgctatctg

SEQ ID NO: 14025 - RNA, 21 nt, synthetic construct
  source 1..21: mol_type = other RNA
aagagtgagtttgccaagcag

SEQ ID NO: 14026 - RNA, 21 nt, synthetic construct
  source 1..21: mol_type = other RNA
aagatacgcctggttgcccag

SEQ ID NO: 14027 - RNA, 21 nt, synthetic construct
  source 1..21: mol_type = other RNA
aagatgcctgaggcctgggca

SEQ ID NO: 14028 - RNA, 21 nt, synthetic construct
  source 1..21: mol_type = other RNA
aagcaggggagctgggtttgg

SEQ ID NO: 14029 - RNA, 21 nt, synthetic construct
  source 1..21: mol_type = other RNA
aagcagtcaccccacagttgg

SEQ ID NO: 14030 - RNA, 21 nt, synthetic construct
  source 1..21: mol_type = other RNA
aagcagtttggaaaaacaaaa

SEQ ID NO: 14031 - RNA, 21 nt, synthetic construct
  source 1..21: mol_type = other RNA
aagcatcgcccccctgctgtg

SEQ ID NO: 14032 - RNA, 21 nt, synthetic construct
  source 1..21: mol_type = other RNA
aagcccagagcagggccttag

SEQ ID NO: 14033 - RNA, 21 nt, synthetic construct
  source 1..21: mol_type = other RNA
aagcccaggagaggcgctcag

SEQ ID NO: 14034 - RNA, 21 nt, synthetic construct
  source 1..21: mol_type = other RNA
aagccccctcccttccccgtt

SEQ ID NO: 14035 - RNA, 21 nt, synthetic construct
  source 1..21: mol_type = other RNA
aagccgaagtccagggggtcg

SEQ ID NO: 14036 - RNA, 21 nt, synthetic construct
  source 1..21: mol_type = other RNA
aagccgtgggcccagggctat

SEQ ID NO: 14037 - RNA, 21 nt, synthetic construct
  source 1..21: mol_type = other RNA
aagcctgagcgcctctcctgg

SEQ ID NO: 14038 - RNA, 21 nt, synthetic construct
  source 1..21: mol_type = other RNA
aagcgccacctgtgggtggtg

SEQ ID NO: 14039 - RNA, 21 nt, synthetic construct
  source 1..21: mol_type = other RNA
aagcgggaccctgctctgggc

SEQ ID NO: 14040 - RNA, 21 nt, synthetic construct
  source 1..21: mol_type = other RNA
aagctaaactcctagatccac

SEQ ID NO: 14041 - RNA, 21 nt, synthetic construct
  source 1..21: mol_type = other RNA
aagctcggaaaccaccccagc

SEQ ID NO: 14042 - RNA, 21 nt, synthetic construct
  source 1..21: mol_type = other RNA
aagctgcagcaccaggatcag

SEQ ID NO: 14043 - RNA, 21 nt, synthetic construct
  source 1..21: mol_type = other RNA
aagctgcccatctggaggagg

SEQ ID NO: 14044 - RNA, 21 nt, synthetic construct
  source 1..21: mol_type = other RNA
aagctggtcaccccacaccca

SEQ ID NO: 14045 - RNA, 21 nt, synthetic construct
  source 1..21: mol_type = other RNA
aaggaaagaaggatggagaaa

SEQ ID NO: 14046 - RNA, 21 nt, synthetic construct
  source 1..21: mol_type = other RNA
aaggaagctgcagcaccagga

SEQ ID NO: 14047 - RNA, 21 nt, synthetic construct
  source 1..21: mol_type = other RNA
aaggacctgcccagtacaggc

SEQ ID NO: 14048 - RNA, 21 nt, synthetic construct
  source 1..21: mol_type = other RNA
aaggacctggctgggtttaag

SEQ ID NO: 14049 - RNA, 21 nt, synthetic construct
  source 1..21: mol_type = other RNA
aaggactcaaacccagaagcc

SEQ ID NO: 14050 - RNA, 21 nt, synthetic construct
  source 1..21: mol_type = other RNA
aaggactcctggctatctgca

SEQ ID NO: 14051 - RNA, 21 nt, synthetic construct
  source 1..21: mol_type = other RNA
aaggagagcaatgggcctttc

SEQ ID NO: 14052 - RNA, 21 nt, synthetic construct
  source 1..21: mol_type = other RNA
aaggaggaggggctggaacct

SEQ ID NO: 14053 - RNA, 21 nt, synthetic construct
  source 1..21: mol_type = other RNA
aaggagtccaggcccccagcc

SEQ ID NO: 14054 - RNA, 21 nt, synthetic construct
  source 1..21: mol_type = other RNA
aaggagtgaagctaaactcct

SEQ ID NO: 14055 - RNA, 21 nt, synthetic construct
  source 1..21: mol_type = other RNA
aaggatgcaggacgagaaaca

SEQ ID NO: 14056 - RNA, 21 nt, synthetic construct
  source 1..21: mol_type = other RNA
aaggatggagaaagagaaagg

SEQ ID NO: 14057 - RNA, 21 nt, synthetic construct
  source 1..21: mol_type = other RNA
aaggcaattggggtgcaggaa

SEQ ID NO: 14058 - RNA, 21 nt, synthetic construct
  source 1..21: mol_type = other RNA
aaggcagcctggtagacaggg

SEQ ID NO: 14059 - RNA, 21 nt, synthetic construct
  source 1..21: mol_type = other RNA
aaggcaggaggggctgggggc

SEQ ID NO: 14060 - RNA, 21 nt, synthetic construct
  source 1..21: mol_type = other RNA
aaggccaccctgtgctgggac

SEQ ID NO: 14061 - RNA, 21 nt, synthetic construct
  source 1..21: mol_type = other RNA
aaggccagtagccagccccgt

SEQ ID NO: 14062 - RNA, 21 nt, synthetic construct
  source 1..21: mol_type = other RNA
aaggcccattgctctccttgc

SEQ ID NO: 14063 - RNA, 21 nt, synthetic construct
  source 1..21: mol_type = other RNA
aaggccctgctctgggcttct

SEQ ID NO: 14064 - RNA, 21 nt, synthetic construct
  source 1..21: mol_type = other RNA
aaggcctggccggcctgacca

SEQ ID NO: 14065 - RNA, 21 nt, synthetic construct
  source 1..21: mol_type = other RNA
aaggcctggggcaagtccctc

SEQ ID NO: 14066 - RNA, 21 nt, synthetic construct
  source 1..21: mol_type = other RNA
aagggaaaggcccattgctct

SEQ ID NO: 14067 - RNA, 21 nt, synthetic construct
  source 1..21: mol_type = other RNA
aagggaagaatgagaaacggt

SEQ ID NO: 14068 - RNA, 21 nt, synthetic construct
  source 1..21: mol_type = other RNA
aagggaatccctcctctctga

SEQ ID NO: 14069 - RNA, 21 nt, synthetic construct
  source 1..21: mol_type = other RNA
aagggagggggcttctcatct

SEQ ID NO: 14070 - RNA, 21 nt, synthetic construct
  source 1..21: mol_type = other RNA
aagggagtagaggcggccacg

SEQ ID NO: 14071 - RNA, 21 nt, synthetic construct
  source 1..21: mol_type = other RNA
aagggagttttccacacggac

SEQ ID NO: 14072 - RNA, 21 nt, synthetic construct
  source 1..21: mol_type = other RNA
aagggctggggcctggcctcc

SEQ ID NO: 14073 - RNA, 21 nt, synthetic construct
  source 1..21: mol_type = other RNA
aaggggcaggagagccagggg

SEQ ID NO: 14074 - RNA, 21 nt, synthetic construct
  source 1..21: mol_type = other RNA
aaggggccgcacgtgccctgg

SEQ ID NO: 14075 - RNA, 21 nt, synthetic construct
  source 1..21: mol_type = other RNA
aagggggacagggaagcctga

SEQ ID NO: 14076 - RNA, 21 nt, synthetic construct
  source 1..21: mol_type = other RNA
aagggggatgcaggggaacgg

SEQ ID NO: 14077 - RNA, 21 nt, synthetic construct
  source 1..21: mol_type = other RNA
aagggtcaagctcggaaacca

SEQ ID NO: 14078 - RNA, 21 nt, synthetic construct
  source 1..21: mol_type = other RNA
aaggtgaagagccaaagttag

SEQ ID NO: 14079 - RNA, 21 nt, synthetic construct
  source 1..21: mol_type = other RNA
aagtaggtggcctggggcctc

SEQ ID NO: 14080 - RNA, 21 nt, synthetic construct
  source 1..21: mol_type = other RNA
aagtccagggggtcggaggag

SEQ ID NO: 14081 - RNA, 21 nt, synthetic construct
  source 1..21: mol_type = other RNA
aagtccctcacctctccaaag

SEQ ID NO: 14082 - RNA, 21 nt, synthetic construct
  source 1..21: mol_type = other RNA
aagtccctcctccgaccccct

SEQ ID NO: 14083 - RNA, 21 nt, synthetic construct
  source 1..21: mol_type = other RNA
aagtcgggactccagagggag

SEQ ID NO: 14084 - RNA, 21 nt, synthetic construct
  source 1..21: mol_type = other RNA
aagtgaacggggaagggaggg

SEQ ID NO: 14085 - RNA, 21 nt, synthetic construct
  source 1..21: mol_type = other RNA
aagtggttgataaacccacgt

SEQ ID NO: 14086 - RNA, 21 nt, synthetic construct
  source 1..21: mol_type = other RNA
aagtgtaaggaagctgcagca

SEQ ID NO: 14087 - RNA, 21 nt, synthetic construct
  source 1..21: mol_type = other RNA
aagttagaactcaggaccaac

SEQ ID NO: 14088 - RNA, 21 nt, synthetic construct
  source 1..21: mol_type = other RNA
aagttcttagggtaccccacg

SEQ ID NO: 14089 - RNA, 21 nt, synthetic construct
  source 1..21: mol_type = other RNA
aagttggtcctgagttctaac

SEQ ID NO: 14090 - RNA, 21 nt, synthetic construct
  source 1..21: mol_type = other RNA
aagttttggacccctaaggga

SEQ ID NO: 14091 - RNA, 21 nt, synthetic construct
  source 1..21: mol_type = other RNA
aataaacgagccgagttcatc

SEQ ID NO: 14092 - RNA, 21 nt, synthetic construct
  source 1..21: mol_type = other RNA
aataagttggtcctgagttct

SEQ ID NO: 14093 - RNA, 21 nt, synthetic construct
  source 1..21: mol_type = other RNA
aatataaattggggactagaa

SEQ ID NO: 14094 - RNA, 21 nt, synthetic construct
  source 1..21: mol_type = other RNA
aatatgtcccagatagcactg

SEQ ID NO: 14095 - RNA, 21 nt, synthetic construct
  source 1..21: mol_type = other RNA
aatcaagagtcacccagagac

SEQ ID NO: 14096 - RNA, 21 nt, synthetic construct
  source 1..21: mol_type = other RNA
aatcagaataagttggtcctg

SEQ ID NO: 14097 - RNA, 21 nt, synthetic construct
  source 1..21: mol_type = other RNA
aatccacccaaaaggcagcct

SEQ ID NO: 14098 - RNA, 21 nt, synthetic construct
  source 1..21: mol_type = other RNA
aatccctcctctctgaacccc

SEQ ID NO: 14099 - RNA, 21 nt, synthetic construct
  source 1..21: mol_type = other RNA
aatcctggctccagcccctcc

SEQ ID NO: 14100 - RNA, 21 nt, synthetic construct
  source 1..21: mol_type = other RNA
aatgacccaacagcctctggc

SEQ ID NO: 14101 - RNA, 21 nt, synthetic construct
  source 1..21: mol_type = other RNA
aatgagaaacggtggcccgtg

SEQ ID NO: 14102 - RNA, 21 nt, synthetic construct
  source 1..21: mol_type = other RNA
aatgctccaggcctcctggga

SEQ ID NO: 14103 - RNA, 21 nt, synthetic construct
  source 1..21: mol_type = other RNA
aatgggcctttccctttcaag

SEQ ID NO: 14104 - RNA, 21 nt, synthetic construct
  source 1..21: mol_type = other RNA
aatggggagaggctgggggcc

SEQ ID NO: 14105 - RNA, 21 nt, synthetic construct
  source 1..21: mol_type = other RNA
aatggggaggggttgggcctg

SEQ ID NO: 14106 - RNA, 21 nt, synthetic construct
  source 1..21: mol_type = other RNA
aatgggggcagggtaccagcc

SEQ ID NO: 14107 - RNA, 21 nt, synthetic construct
  source 1..21: mol_type = other RNA
aatggtgcgtcctaggtgttc

SEQ ID NO: 14108 - RNA, 21 nt, synthetic construct
  source 1..21: mol_type = other RNA
aattaccccccaagtccctca

SEQ ID NO: 14109 - RNA, 21 nt, synthetic construct
  source 1..21: mol_type = other RNA
aattgccttagtggctagggg

SEQ ID NO: 14110 - RNA, 21 nt, synthetic construct
  source 1..21: mol_type = other RNA
aattggggactagaaaggtga

SEQ ID NO: 14111 - RNA, 21 nt, synthetic construct
  source 1..21: mol_type = other RNA
aattggggtgcaggaatgggg

SEQ ID NO: 14112 - RNA, 21 nt, synthetic construct
  source 1..21: mol_type = other RNA
aatttatattgttcctccgtg

SEQ ID NO: 14113 - RNA, 21 nt, synthetic construct
  source 1..21: mol_type = other RNA
aatttatcccgtggatctagg

SEQ ID NO: 14114 - RNA, 21 nt, synthetic construct
  source 1..21: mol_type = other RNA
acaaaagccgaagtccagggg

SEQ ID NO: 14115 - RNA, 21 nt, synthetic construct
  source 1..21: mol_type = other RNA
acaaaatcagaataagttggt

SEQ ID NO: 14116 - RNA, 21 nt, synthetic construct
  source 1..21: mol_type = other RNA
acaaagggagttttccacacg

SEQ ID NO: 14117 - RNA, 21 nt, synthetic construct
  source 1..21: mol_type = other RNA
acaactgggtggaaataaacg

SEQ ID NO: 14118 - RNA, 21 nt, synthetic construct
  source 1..21: mol_type = other RNA
acaaggcctggggcaagtccc

SEQ ID NO: 14119 - RNA, 21 nt, synthetic construct
  source 1..21: mol_type = other RNA
acaatataaattggggactag

SEQ ID NO: 14120 - RNA, 21 nt, synthetic construct
  source 1..21: mol_type = other RNA
acacagccccaggtggagaaa

SEQ ID NO: 14121 - RNA, 21 nt, synthetic construct
  source 1..21: mol_type = other RNA
acacaggtgtgcagctgtctc

SEQ ID NO: 14122 - RNA, 21 nt, synthetic construct
  source 1..21: mol_type = other RNA
acacccagacctgacccaaac

SEQ ID NO: 14123 - RNA, 21 nt, synthetic construct
  source 1..21: mol_type = other RNA
acacccccctcctcaccacag

SEQ ID NO: 14124 - RNA, 21 nt, synthetic construct
  source 1..21: mol_type = other RNA
acacctaggacgcaccattct

SEQ ID NO: 14125 - RNA, 21 nt, synthetic construct
  source 1..21: mol_type = other RNA
acacctgtgtgcctgggcccc

SEQ ID NO: 14126 - RNA, 21 nt, synthetic construct
  source 1..21: mol_type = other RNA
acacggacacccccctcctca

SEQ ID NO: 14127 - RNA, 21 nt, synthetic construct
  source 1..21: mol_type = other RNA
acacggcaaaacccccgtcac

SEQ ID NO: 14128 - RNA, 21 nt, synthetic construct
  source 1..21: mol_type = other RNA
acacgggccaccgtttctcat

SEQ ID NO: 14129 - RNA, 21 nt, synthetic construct
  source 1..21: mol_type = other RNA
acacggtgctaggacagtggg

SEQ ID NO: 14130 - RNA, 21 nt, synthetic construct
  source 1..21: mol_type = other RNA
acactccagttcactgaggcc

SEQ ID NO: 14131 - RNA, 21 nt, synthetic construct
  source 1..21: mol_type = other RNA
acactgggtgggctccgggac

SEQ ID NO: 14132 - RNA, 21 nt, synthetic construct
  source 1..21: mol_type = other RNA
acacttcccaagaggagaagc

SEQ ID NO: 14133 - RNA, 21 nt, synthetic construct
  source 1..21: mol_type = other RNA
acagactcaggggcctgggcg

SEQ ID NO: 14134 - RNA, 21 nt, synthetic construct
  source 1..21: mol_type = other RNA
acagagaagagctgggggcct

SEQ ID NO: 14135 - RNA, 21 nt, synthetic construct
  source 1..21: mol_type = other RNA
acagatccagggacacggtgc

SEQ ID NO: 14136 - RNA, 21 nt, synthetic construct
  source 1..21: mol_type = other RNA
acagcaggggggcgatgcttg

SEQ ID NO: 14137 - RNA, 21 nt, synthetic construct
  source 1..21: mol_type = other RNA
acagcataagctggtcacccc

SEQ ID NO: 14138 - RNA, 21 nt, synthetic construct
  source 1..21: mol_type = other RNA
acagccacagcaggggggcga

SEQ ID NO: 14139 - RNA, 21 nt, synthetic construct
  source 1..21: mol_type = other RNA
acagccagtggccagaggctg

SEQ ID NO: 14140 - RNA, 21 nt, synthetic construct
  source 1..21: mol_type = other RNA
acagccccaggtggagaaact

SEQ ID NO: 14141 - RNA, 21 nt, synthetic construct
  source 1..21: mol_type = other RNA
acagcccgagtttccatgacc

SEQ ID NO: 14142 - RNA, 21 nt, synthetic construct
  source 1..21: mol_type = other RNA
acagccctgccaggacggggc

SEQ ID NO: 14143 - RNA, 21 nt, synthetic construct
  source 1..21: mol_type = other RNA
acagcctagttttagcactga

SEQ ID NO: 14144 - RNA, 21 nt, synthetic construct
  source 1..21: mol_type = other RNA
acagcctctggccactggctg

SEQ ID NO: 14145 - RNA, 21 nt, synthetic construct
  source 1..21: mol_type = other RNA
acagcctggggcccaggcaca

SEQ ID NO: 14146 - RNA, 21 nt, synthetic construct
  source 1..21: mol_type = other RNA
acagctgcacacctgtgtgcc

SEQ ID NO: 14147 - RNA, 21 nt, synthetic construct
  source 1..21: mol_type = other RNA
acaggaagtgaacggggaagg

SEQ ID NO: 14148 - RNA, 21 nt, synthetic construct
  source 1..21: mol_type = other RNA
acaggcatccctgtgaaagat

SEQ ID NO: 14149 - RNA, 21 nt, synthetic construct
  source 1..21: mol_type = other RNA
acagggaagcctgagcgcctc

SEQ ID NO: 14150 - RNA, 21 nt, synthetic construct
  source 1..21: mol_type = other RNA
acagggatgcctgtactgggc

SEQ ID NO: 14151 - RNA, 21 nt, synthetic construct
  source 1..21: mol_type = other RNA
acagggatggttggtcactgt

SEQ ID NO: 14152 - RNA, 21 nt, synthetic construct
  source 1..21: mol_type = other RNA
acagggctggggtggcctctc

SEQ ID NO: 14153 - RNA, 21 nt, synthetic construct
  source 1..21: mol_type = other RNA
acaggggttcctggctctgct

SEQ ID NO: 14154 - RNA, 21 nt, synthetic construct
  source 1..21: mol_type = other RNA
acagggtggccttcctccacc

SEQ ID NO: 14155 - RNA, 21 nt, synthetic construct
  source 1..21: mol_type = other RNA
acaggtaaaactgacgcacgg

SEQ ID NO: 14156 - RNA, 21 nt, synthetic construct
  source 1..21: mol_type = other RNA
acaggtaccatgtggggttcc

SEQ ID NO: 14157 - RNA, 21 nt, synthetic construct
  source 1..21: mol_type = other RNA
acaggtggcgcttccagtgct

SEQ ID NO: 14158 - RNA, 21 nt, synthetic construct
  source 1..21: mol_type = other RNA
acaggtgtgcagctgtctcac

SEQ ID NO: 14159 - RNA, 21 nt, synthetic construct
  source 1..21: mol_type = other RNA
acagtgaccaaccatccctgt

SEQ ID NO: 14160 - RNA, 21 nt, synthetic construct
  source 1..21: mol_type = other RNA
acagtggggaaaatgacccaa

SEQ ID NO: 14161 - RNA, 21 nt, synthetic construct
  source 1..21: mol_type = other RNA
acagttggaggagaatccacc

SEQ ID NO: 14162 - RNA, 21 nt, synthetic construct
  source 1..21: mol_type = other RNA
acatattcctccgcccagagc

SEQ ID NO: 14163 - RNA, 21 nt, synthetic construct
  source 1..21: mol_type = other RNA
acatggtacctgttagacacg

SEQ ID NO: 14164 - RNA, 21 nt, synthetic construct
  source 1..21: mol_type = other RNA
accaaccatccctgttttcct

SEQ ID NO: 14165 - RNA, 21 nt, synthetic construct
  source 1..21: mol_type = other RNA
accaacttattctgattttgt

SEQ ID NO: 14166 - RNA, 21 nt, synthetic construct
  source 1..21: mol_type = other RNA
accaagtggttgataaaccca

SEQ ID NO: 14167 - RNA, 21 nt, synthetic construct
  source 1..21: mol_type = other RNA
accacagccctgccaggacgg

SEQ ID NO: 14168 - RNA, 21 nt, synthetic construct
  source 1..21: mol_type = other RNA
accacccacaggtggcgcttc

SEQ ID NO: 14169 - RNA, 21 nt, synthetic construct
  source 1..21: mol_type = other RNA
accaccccagcagatactctg

SEQ ID NO: 14170 - RNA, 21 nt, synthetic construct
  source 1..21: mol_type = other RNA
accacgaaaggactcctggct

SEQ ID NO: 14171 - RNA, 21 nt, synthetic construct
  source 1..21: mol_type = other RNA
accactgggcaaccaggcgta

SEQ ID NO: 14172 - RNA, 21 nt, synthetic construct
  source 1..21: mol_type = other RNA
accacttggtgaggctggtac

SEQ ID NO: 14173 - RNA, 21 nt, synthetic construct
  source 1..21: mol_type = other RNA
accagacggccgcgtcagagc

SEQ ID NO: 14174 - RNA, 21 nt, synthetic construct
  source 1..21: mol_type = other RNA
accagcctcaccaagtggttg

SEQ ID NO: 14175 - RNA, 21 nt, synthetic construct
  source 1..21: mol_type = other RNA
accagcttatgctgtttgccc

SEQ ID NO: 14176 - RNA, 21 nt, synthetic construct
  source 1..21: mol_type = other RNA
accaggatcagtgaaacgcac

SEQ ID NO: 14177 - RNA, 21 nt, synthetic construct
  source 1..21: mol_type = other RNA
accaggcgtatcttaaacagc

SEQ ID NO: 14178 - RNA, 21 nt, synthetic construct
  source 1..21: mol_type = other RNA
accaggctgccttttgggtgg

SEQ ID NO: 14179 - RNA, 21 nt, synthetic construct
  source 1..21: mol_type = other RNA
accagggactccagagtccag

SEQ ID NO: 14180 - RNA, 21 nt, synthetic construct
  source 1..21: mol_type = other RNA
accaggtcgtggccgcctcta

SEQ ID NO: 14181 - RNA, 21 nt, synthetic construct
  source 1..21: mol_type = other RNA
accatccctgttttcctagga

SEQ ID NO: 14182 - RNA, 21 nt, synthetic construct
  source 1..21: mol_type = other RNA
accatctcatgcccctggctc

SEQ ID NO: 14183 - RNA, 21 nt, synthetic construct
  source 1..21: mol_type = other RNA
accatgtggggttcccgcacc

SEQ ID NO: 14184 - RNA, 21 nt, synthetic construct
  source 1..21: mol_type = other RNA
accattctcacaaagggagtt

SEQ ID NO: 14185 - RNA, 21 nt, synthetic construct
  source 1..21: mol_type = other RNA
acccaaaaggcagcctggtag

SEQ ID NO: 14186 - RNA, 21 nt, synthetic construct
  source 1..21: mol_type = other RNA
acccaaacccagctcccctgc

SEQ ID NO: 14187 - RNA, 21 nt, synthetic construct
  source 1..21: mol_type = other RNA
acccaacagcctctggccact

SEQ ID NO: 14188 - RNA, 21 nt, synthetic construct
  source 1..21: mol_type = other RNA
acccacaggtggcgcttccag

SEQ ID NO: 14189 - RNA, 21 nt, synthetic construct
  source 1..21: mol_type = other RNA
acccacgagtccaggccccag

SEQ ID NO: 14190 - RNA, 21 nt, synthetic construct
  source 1..21: mol_type = other RNA
acccacgtggggtaccctaag

SEQ ID NO: 14191 - RNA, 21 nt, synthetic construct
  source 1..21: mol_type = other RNA
acccagaagcccagagcaggg

SEQ ID NO: 14192 - RNA, 21 nt, synthetic construct
  source 1..21: mol_type = other RNA
acccagacctgacccaaaccc

SEQ ID NO: 14193 - RNA, 21 nt, synthetic construct
  source 1..21: mol_type = other RNA
acccagagacagtgaccaacc

SEQ ID NO: 14194 - RNA, 21 nt, synthetic construct
  source 1..21: mol_type = other RNA
acccagatgagaagccccctc

SEQ ID NO: 14195 - RNA, 21 nt, synthetic construct
  source 1..21: mol_type = other RNA
acccagccaggtccttccaag

SEQ ID NO: 14196 - RNA, 21 nt, synthetic construct
  source 1..21: mol_type = other RNA
acccagctcccctgcttcttg

SEQ ID NO: 14197 - RNA, 21 nt, synthetic construct
  source 1..21: mol_type = other RNA
acccaggagcccaggccccca

SEQ ID NO: 14198 - RNA, 21 nt, synthetic construct
  source 1..21: mol_type = other RNA
acccaggaggccaggccccag

SEQ ID NO: 14199 - RNA, 21 nt, synthetic construct
  source 1..21: mol_type = other RNA
acccaggggtccaggcccagc

SEQ ID NO: 14200 - RNA, 21 nt, synthetic construct
  source 1..21: mol_type = other RNA
acccagtgtccacaaggcctg

SEQ ID NO: 14201 - RNA, 21 nt, synthetic construct
  source 1..21: mol_type = other RNA
acccagttgtcatggcgatag

SEQ ID NO: 14202 - RNA, 21 nt, synthetic construct
  source 1..21: mol_type = other RNA
accccaatgctccaggcctcc

SEQ ID NO: 14203 - RNA, 21 nt, synthetic construct
  source 1..21: mol_type = other RNA
accccaattgccttagtggct

SEQ ID NO: 14204 - RNA, 21 nt, synthetic construct
  source 1..21: mol_type = other RNA
accccacacccagacctgacc

SEQ ID NO: 14205 - RNA, 21 nt, synthetic construct
  source 1..21: mol_type = other RNA
accccacagttggaggagaat

SEQ ID NO: 14206 - RNA, 21 nt, synthetic construct
  source 1..21: mol_type = other RNA
accccacatggtacctgttag

SEQ ID NO: 14207 - RNA, 21 nt, synthetic construct
  source 1..21: mol_type = other RNA
accccacgagaggccacccca

SEQ ID NO: 14208 - RNA, 21 nt, synthetic construct
  source 1..21: mol_type = other RNA
accccacgtgggtttatcaac

SEQ ID NO: 14209 - RNA, 21 nt, synthetic construct
  source 1..21: mol_type = other RNA
accccagcagatactctgcag

SEQ ID NO: 14210 - RNA, 21 nt, synthetic construct
  source 1..21: mol_type = other RNA
accccagcccaccccaatgct

SEQ ID NO: 14211 - RNA, 21 nt, synthetic construct
  source 1..21: mol_type = other RNA
accccagccctgtctaccagg

SEQ ID NO: 14212 - RNA, 21 nt, synthetic construct
  source 1..21: mol_type = other RNA
accccccaagtccctcacctc

SEQ ID NO: 14213 - RNA, 21 nt, synthetic construct
  source 1..21: mol_type = other RNA
acccccctcctcaccacagcc

SEQ ID NO: 14214 - RNA, 21 nt, synthetic construct
  source 1..21: mol_type = other RNA
acccccgtcaccacccacagg

SEQ ID NO: 14215 - RNA, 21 nt, synthetic construct
  source 1..21: mol_type = other RNA
accccctagccactaaggcaa

SEQ ID NO: 14216 - RNA, 21 nt, synthetic construct
  source 1..21: mol_type = other RNA
accccctggacttcggctttt

SEQ ID NO: 14217 - RNA, 21 nt, synthetic construct
  source 1..21: mol_type = other RNA
accccgaagagtgagtttgcc

SEQ ID NO: 14218 - RNA, 21 nt, synthetic construct
  source 1..21: mol_type = other RNA
acccctaagggaagaatgaga

SEQ ID NO: 14219 - RNA, 21 nt, synthetic construct
  source 1..21: mol_type = other RNA
acccctccccattcaacccag

SEQ ID NO: 14220 - RNA, 21 nt, synthetic construct
  source 1..21: mol_type = other RNA
acccctctgggagtcccgccc

SEQ ID NO: 14221 - RNA, 21 nt, synthetic construct
  source 1..21: mol_type = other RNA
acccctgggtctgaatgggga

SEQ ID NO: 14222 - RNA, 21 nt, synthetic construct
  source 1..21: mol_type = other RNA
acccctgtagggaaggggcag

SEQ ID NO: 14223 - RNA, 21 nt, synthetic construct
  source 1..21: mol_type = other RNA
accctaagaacttgggaacag

SEQ ID NO: 14224 - RNA, 21 nt, synthetic construct
  source 1..21: mol_type = other RNA
accctcagtcctaggaaaaca

SEQ ID NO: 14225 - RNA, 21 nt, synthetic construct
  source 1..21: mol_type = other RNA
accctctcccagaacctgagc

SEQ ID NO: 14226 - RNA, 21 nt, synthetic construct
  source 1..21: mol_type = other RNA
accctgcatagccctgggccc

SEQ ID NO: 14227 - RNA, 21 nt, synthetic construct
  source 1..21: mol_type = other RNA
accctgcccccattcctgcac

SEQ ID NO: 14228 - RNA, 21 nt, synthetic construct
  source 1..21: mol_type = other RNA
accctgcgctaccctctccca

SEQ ID NO: 14229 - RNA, 21 nt, synthetic construct
  source 1..21: mol_type = other RNA
accctgctctgggcggaggaa

SEQ ID NO: 14230 - RNA, 21 nt, synthetic construct
  source 1..21: mol_type = other RNA
accctgtgctgggacagactc

SEQ ID NO: 14231 - RNA, 21 nt, synthetic construct
  source 1..21: mol_type = other RNA
acccttggaaggacctggctg

SEQ ID NO: 14232 - RNA, 21 nt, synthetic construct
  source 1..21: mol_type = other RNA
accgtgtccctggatctgttt

SEQ ID NO: 14233 - RNA, 21 nt, synthetic construct
  source 1..21: mol_type = other RNA
accgtttctcattcttccctt

SEQ ID NO: 14234 - RNA, 21 nt, synthetic construct
  source 1..21: mol_type = other RNA
acctacttggcctggacccca

SEQ ID NO: 14235 - RNA, 21 nt, synthetic construct
  source 1..21: mol_type = other RNA
acctaggacgcaccattctca

SEQ ID NO: 14236 - RNA, 21 nt, synthetic construct
  source 1..21: mol_type = other RNA
acctcatgctcttggccctcg

SEQ ID NO: 14237 - RNA, 21 nt, synthetic construct
  source 1..21: mol_type = other RNA
acctctccaaagctgcccatc

SEQ ID NO: 14238 - RNA, 21 nt, synthetic construct
  source 1..21: mol_type = other RNA
acctcttccctagtctgagca

SEQ ID NO: 14239 - RNA, 21 nt, synthetic construct
  source 1..21: mol_type = other RNA
acctgaactggagctgaggaa

SEQ ID NO: 14240 - RNA, 21 nt, synthetic construct
  source 1..21: mol_type = other RNA
acctgacccaaacccagctcc

SEQ ID NO: 14241 - RNA, 21 nt, synthetic construct
  source 1..21: mol_type = other RNA
acctgagaagggaatccctcc

SEQ ID NO: 14242 - RNA, 21 nt, synthetic construct
  source 1..21: mol_type = other RNA
acctgagctgctctgacgcgg

SEQ ID NO: 14243 - RNA, 21 nt, synthetic construct
  source 1..21: mol_type = other RNA
acctgcccagtacaggcatcc

SEQ ID NO: 14244 - RNA, 21 nt, synthetic construct
  source 1..21: mol_type = other RNA
acctgcccggttctcagtggc

SEQ ID NO: 14245 - RNA, 21 nt, synthetic construct
  source 1..21: mol_type = other RNA
acctgcctggagaaggatgca

SEQ ID NO: 14246 - RNA, 21 nt, synthetic construct
  source 1..21: mol_type = other RNA
acctggctgggtttaaggcag

SEQ ID NO: 14247 - RNA, 21 nt, synthetic construct
  source 1..21: mol_type = other RNA
acctggggctgtgtttctcgt

SEQ ID NO: 14248 - RNA, 21 nt, synthetic construct
  source 1..21: mol_type = other RNA
acctggtgaacacctaggacg

SEQ ID NO: 14249 - RNA, 21 nt, synthetic construct
  source 1..21: mol_type = other RNA
acctgtgagataaggccagta

SEQ ID NO: 14250 - RNA, 21 nt, synthetic construct
  source 1..21: mol_type = other RNA
acctgtgggtggtgacggggg

SEQ ID NO: 14251 - RNA, 21 nt, synthetic construct
  source 1..21: mol_type = other RNA
acctgtgtgcctgggccccag

SEQ ID NO: 14252 - RNA, 21 nt, synthetic construct
  source 1..21: mol_type = other RNA
acctgttagacacggcaaaac

SEQ ID NO: 14253 - RNA, 21 nt, synthetic construct
  source 1..21: mol_type = other RNA
acctttctagtccccaattta

SEQ ID NO: 14254 - RNA, 21 nt, synthetic construct
  source 1..21: mol_type = other RNA
acgaaaacagatccagggaca

SEQ ID NO: 14255 - RNA, 21 nt, synthetic construct
  source 1..21: mol_type = other RNA
acgaaaggactcctggctatc

SEQ ID NO: 14256 - RNA, 21 nt, synthetic construct
  source 1..21: mol_type = other RNA
acgaagccgtgggcccagggc

SEQ ID NO: 14257 - RNA, 21 nt, synthetic construct
  source 1..21: mol_type = other RNA
acgacctggtgaacacctagg

SEQ ID NO: 14258 - RNA, 21 nt, synthetic construct
  source 1..21: mol_type = other RNA
acgagaaacacagccccaggt

SEQ ID NO: 14259 - RNA, 21 nt, synthetic construct
  source 1..21: mol_type = other RNA
acgagaggccaccccagccct

SEQ ID NO: 14260 - RNA, 21 nt, synthetic construct
  source 1..21: mol_type = other RNA
acgagccgagttcatcccgtt

SEQ ID NO: 14261 - RNA, 21 nt, synthetic construct
  source 1..21: mol_type = other RNA
acgaggaagggggacagggaa

SEQ ID NO: 14262 - RNA, 21 nt, synthetic construct
  source 1..21: mol_type = other RNA
acgagggccaagagcatgagg

SEQ ID NO: 14263 - RNA, 21 nt, synthetic construct
  source 1..21: mol_type = other RNA
acgagtccaggccccagcccc

SEQ ID NO: 14264 - RNA, 21 nt, synthetic construct
  source 1..21: mol_type = other RNA
acgcaccagacggccgcgtca

SEQ ID NO: 14265 - RNA, 21 nt, synthetic construct
  source 1..21: mol_type = other RNA
acgcaccattctcacaaaggg

SEQ ID NO: 14266 - RNA, 21 nt, synthetic construct
  source 1..21: mol_type = other RNA
acgcacggaggaacaatataa

SEQ ID NO: 14267 - RNA, 21 nt, synthetic construct
  source 1..21: mol_type = other RNA
acgcctggttgcccagtggtc

SEQ ID NO: 14268 - RNA, 21 nt, synthetic construct
  source 1..21: mol_type = other RNA
acgcggccgtctggtgcgttt

SEQ ID NO: 14269 - RNA, 21 nt, synthetic construct
  source 1..21: mol_type = other RNA
acggacacccccctcctcacc

SEQ ID NO: 14270 - RNA, 21 nt, synthetic construct
  source 1..21: mol_type = other RNA
acggaggaacaatataaattg

SEQ ID NO: 14271 - RNA, 21 nt, synthetic construct
  source 1..21: mol_type = other RNA
acggcaaaacccccgtcacca

SEQ ID NO: 14272 - RNA, 21 nt, synthetic construct
  source 1..21: mol_type = other RNA
acggccgcgtcagagcagctc

SEQ ID NO: 14273 - RNA, 21 nt, synthetic construct
  source 1..21: mol_type = other RNA
acggcttcgttcctgcagagt

SEQ ID NO: 14274 - RNA, 21 nt, synthetic construct
  source 1..21: mol_type = other RNA
acgggataaattaccccccaa

SEQ ID NO: 14275 - RNA, 21 nt, synthetic construct
  source 1..21: mol_type = other RNA
acgggatgaactcggctcgtt

SEQ ID NO: 14276 - RNA, 21 nt, synthetic construct
  source 1..21: mol_type = other RNA
acgggccaccgtttctcattc

SEQ ID NO: 14277 - RNA, 21 nt, synthetic construct
  source 1..21: mol_type = other RNA
acggggaagggagggggcttc

SEQ ID NO: 14278 - RNA, 21 nt, synthetic construct
  source 1..21: mol_type = other RNA
acggggatgcaggggaacggg

SEQ ID NO: 14279 - RNA, 21 nt, synthetic construct
  source 1..21: mol_type = other RNA
acggggccctgcagccagggg

SEQ ID NO: 14280 - RNA, 21 nt, synthetic construct
  source 1..21: mol_type = other RNA
acggggctcagtctgaagagc

SEQ ID NO: 14281 - RNA, 21 nt, synthetic construct
  source 1..21: mol_type = other RNA
acggggctggctactggcctt

SEQ ID NO: 14282 - RNA, 21 nt, synthetic construct
  source 1..21: mol_type = other RNA
acgggggttttgccgtgtcta

SEQ ID NO: 14283 - RNA, 21 nt, synthetic construct
  source 1..21: mol_type = other RNA
acggtgctaggacagtgggga

SEQ ID NO: 14284 - RNA, 21 nt, synthetic construct
  source 1..21: mol_type = other RNA
acggtggcccgtgtcagcccc

SEQ ID NO: 14285 - RNA, 21 nt, synthetic construct
  source 1..21: mol_type = other RNA
acggtgtcccagcaagtcggg

SEQ ID NO: 14286 - RNA, 21 nt, synthetic construct
  source 1..21: mol_type = other RNA
acgtaacctgagaagggaatc

SEQ ID NO: 14287 - RNA, 21 nt, synthetic construct
  source 1..21: mol_type = other RNA
acgtgccctgggaacgggatg

SEQ ID NO: 14288 - RNA, 21 nt, synthetic construct
  source 1..21: mol_type = other RNA
acgtgcggccccttcacagcc

SEQ ID NO: 14289 - RNA, 21 nt, synthetic construct
  source 1..21: mol_type = other RNA
acgtggccaagaagcagggga

SEQ ID NO: 14290 - RNA, 21 nt, synthetic construct
  source 1..21: mol_type = other RNA
acgtggggtaccctaagaact

SEQ ID NO: 14291 - RNA, 21 nt, synthetic construct
  source 1..21: mol_type = other RNA
acgtgggtttatcaaccactt

SEQ ID NO: 14292 - RNA, 21 nt, synthetic construct
  source 1..21: mol_type = other RNA
actaaggcaattggggtgcag

SEQ ID NO: 14293 - RNA, 21 nt, synthetic construct
  source 1..21: mol_type = other RNA
actagaaaggtgaagagccaa

SEQ ID NO: 14294 - RNA, 21 nt, synthetic construct
  source 1..21: mol_type = other RNA
actaggctgtcctgggcaaac

SEQ ID NO: 14295 - RNA, 21 nt, synthetic construct
  source 1..21: mol_type = other RNA
actagggaagaggttccagcc

SEQ ID NO: 14296 - RNA, 21 nt, synthetic construct
  source 1..21: mol_type = other RNA
actcaaacccagaagcccaga

SEQ ID NO: 14297 - RNA, 21 nt, synthetic construct
  source 1..21: mol_type = other RNA
actcactcttcggggtatccc

SEQ ID NO: 14298 - RNA, 21 nt, synthetic construct
  source 1..21: mol_type = other RNA
actcaggaccaacttattctg

SEQ ID NO: 14299 - RNA, 21 nt, synthetic construct
  source 1..21: mol_type = other RNA
actcaggggcctgggcgggac

SEQ ID NO: 14300 - RNA, 21 nt, synthetic construct
  source 1..21: mol_type = other RNA
actccagagggagccacgaaa

SEQ ID NO: 14301 - RNA, 21 nt, synthetic construct
  source 1..21: mol_type = other RNA
actccagagtccaggcccaac

SEQ ID NO: 14302 - RNA, 21 nt, synthetic construct
  source 1..21: mol_type = other RNA
actccagttcactgaggcccc

SEQ ID NO: 14303 - RNA, 21 nt, synthetic construct
  source 1..21: mol_type = other RNA
actcccagaggggtgagacag

SEQ ID NO: 14304 - RNA, 21 nt, synthetic construct
  source 1..21: mol_type = other RNA
actccctttctctttctccat

SEQ ID NO: 14305 - RNA, 21 nt, synthetic construct
  source 1..21: mol_type = other RNA
actccctttgtgagaatggtg

SEQ ID NO: 14306 - RNA, 21 nt, synthetic construct
  source 1..21: mol_type = other RNA
actcctagatccacgggataa

SEQ ID NO: 14307 - RNA, 21 nt, synthetic construct
  source 1..21: mol_type = other RNA
actcctggctatctgcaaaca

SEQ ID NO: 14308 - RNA, 21 nt, synthetic construct
  source 1..21: mol_type = other RNA
actcctggctctgaaggagga

SEQ ID NO: 14309 - RNA, 21 nt, synthetic construct
  source 1..21: mol_type = other RNA
actcctgggtctgagggtgga

SEQ ID NO: 14310 - RNA, 21 nt, synthetic construct
  source 1..21: mol_type = other RNA
actccttcatctgagggcgga

SEQ ID NO: 14311 - RNA, 21 nt, synthetic construct
  source 1..21: mol_type = other RNA
actccttcctcagctccagtt

SEQ ID NO: 14312 - RNA, 21 nt, synthetic construct
  source 1..21: mol_type = other RNA
actcggctcgtttatttccac

SEQ ID NO: 14313 - RNA, 21 nt, synthetic construct
  source 1..21: mol_type = other RNA
actcgggctgtgaaggggccg

SEQ ID NO: 14314 - RNA, 21 nt, synthetic construct
  source 1..21: mol_type = other RNA
actcgtgggtctgagggagga

SEQ ID NO: 14315 - RNA, 21 nt, synthetic construct
  source 1..21: mol_type = other RNA
actctagcccccaacccccta

SEQ ID NO: 14316 - RNA, 21 nt, synthetic construct
  source 1..21: mol_type = other RNA
actctgcaggaacgaagccgt

SEQ ID NO: 14317 - RNA, 21 nt, synthetic construct
  source 1..21: mol_type = other RNA
actctggagtccctggtgccc

SEQ ID NO: 14318 - RNA, 21 nt, synthetic construct
  source 1..21: mol_type = other RNA
actcttcggggtatcccagga

SEQ ID NO: 14319 - RNA, 21 nt, synthetic construct
  source 1..21: mol_type = other RNA
actcttgattcccggccagtt

SEQ ID NO: 14320 - RNA, 21 nt, synthetic construct
  source 1..21: mol_type = other RNA
actctttaaggaaagaaggat

SEQ ID NO: 14321 - RNA, 21 nt, synthetic construct
  source 1..21: mol_type = other RNA
actgaaaccctcagtcctagg

SEQ ID NO: 14322 - RNA, 21 nt, synthetic construct
  source 1..21: mol_type = other RNA
actgaaggcctggccggcctg

SEQ ID NO: 14323 - RNA, 21 nt, synthetic construct
  source 1..21: mol_type = other RNA
actgacgcacggaggaacaat

SEQ ID NO: 14324 - RNA, 21 nt, synthetic construct
  source 1..21: mol_type = other RNA
actgagaaccgggcaggtcac

SEQ ID NO: 14325 - RNA, 21 nt, synthetic construct
  source 1..21: mol_type = other RNA
actgagcactgaaggcctggc

SEQ ID NO: 14326 - RNA, 21 nt, synthetic construct
  source 1..21: mol_type = other RNA
actgagccccgttcccctgca

SEQ ID NO: 14327 - RNA, 21 nt, synthetic construct
  source 1..21: mol_type = other RNA
actgaggccccctctgcacgg

SEQ ID NO: 14328 - RNA, 21 nt, synthetic construct
  source 1..21: mol_type = other RNA
actgagggtttcagtgctaaa

SEQ ID NO: 14329 - RNA, 21 nt, synthetic construct
  source 1..21: mol_type = other RNA
actgatcctggtgctgcagct

SEQ ID NO: 14330 - RNA, 21 nt, synthetic construct
  source 1..21: mol_type = other RNA
actgcttctcctcttgggaag

SEQ ID NO: 14331 - RNA, 21 nt, synthetic construct
  source 1..21: mol_type = other RNA
actgcttggcaaactcactct

SEQ ID NO: 14332 - RNA, 21 nt, synthetic construct
  source 1..21: mol_type = other RNA
actggaagcgccacctgtggg

SEQ ID NO: 14333 - RNA, 21 nt, synthetic construct
  source 1..21: mol_type = other RNA
actggagctgaggaaggagtg

SEQ ID NO: 14334 - RNA, 21 nt, synthetic construct
  source 1..21: mol_type = other RNA
actggagtgtgacagcctggg

SEQ ID NO: 14335 - RNA, 21 nt, synthetic construct
  source 1..21: mol_type = other RNA
actggccgggaatcaagagtc

SEQ ID NO: 14336 - RNA, 21 nt, synthetic construct
  source 1..21: mol_type = other RNA
actggccttatctcacaggta

SEQ ID NO: 14337 - RNA, 21 nt, synthetic construct
  source 1..21: mol_type = other RNA
actggctgtttaagatacgcc

SEQ ID NO: 14338 - RNA, 21 nt, synthetic construct
  source 1..21: mol_type = other RNA
actgggcaaccaggcgtatct

SEQ ID NO: 14339 - RNA, 21 nt, synthetic construct
  source 1..21: mol_type = other RNA
actgggcaggtccttgaaagg

SEQ ID NO: 14340 - RNA, 21 nt, synthetic construct
  source 1..21: mol_type = other RNA
actggggactctttaaggaaa

SEQ ID NO: 14341 - RNA, 21 nt, synthetic construct
  source 1..21: mol_type = other RNA
actgggggcctggactcctgg

SEQ ID NO: 14342 - RNA, 21 nt, synthetic construct
  source 1..21: mol_type = other RNA
actgggtggaaataaacgagc

SEQ ID NO: 14343 - RNA, 21 nt, synthetic construct
  source 1..21: mol_type = other RNA
actgggtgggctccgggacct

SEQ ID NO: 14344 - RNA, 21 nt, synthetic construct
  source 1..21: mol_type = other RNA
actgtcctagcaccgtgtccc

SEQ ID NO: 14345 - RNA, 21 nt, synthetic construct
  source 1..21: mol_type = other RNA
actgtctctgggtgactcttg

SEQ ID NO: 14346 - RNA, 21 nt, synthetic construct
  source 1..21: mol_type = other RNA
actgtggggtgactgcttggc

SEQ ID NO: 14347 - RNA, 21 nt, synthetic construct
  source 1..21: mol_type = other RNA
acttattctgattttgttttt

SEQ ID NO: 14348 - RNA, 21 nt, synthetic construct
  source 1..21: mol_type = other RNA
acttcccaagaggagaagcag

SEQ ID NO: 14349 - RNA, 21 nt, synthetic construct
  source 1..21: mol_type = other RNA
acttcctgtttgcagatagcc

SEQ ID NO: 14350 - RNA, 21 nt, synthetic construct
  source 1..21: mol_type = other RNA
acttcggcttttgtcccccca

SEQ ID NO: 14351 - RNA, 21 nt, synthetic construct
  source 1..21: mol_type = other RNA
acttctgggtcttagggaggc

SEQ ID NO: 14352 - RNA, 21 nt, synthetic construct
  source 1..21: mol_type = other RNA
acttgccccaggccttgtgga

SEQ ID NO: 14353 - RNA, 21 nt, synthetic construct
  source 1..21: mol_type = other RNA
acttggcctggaccccacgag

SEQ ID NO: 14354 - RNA, 21 nt, synthetic construct
  source 1..21: mol_type = other RNA
acttgggaacagccacagcag

SEQ ID NO: 14355 - RNA, 21 nt, synthetic construct
  source 1..21: mol_type = other RNA
acttggggggacaaaagccga

SEQ ID NO: 14356 - RNA, 21 nt, synthetic construct
  source 1..21: mol_type = other RNA
acttggggggtaatttatccc

SEQ ID NO: 14357 - RNA, 21 nt, synthetic construct
  source 1..21: mol_type = other RNA
acttggtgaggctggtaccct

SEQ ID NO: 14358 - RNA, 21 nt, synthetic construct
  source 1..21: mol_type = other RNA
actttggctcttcacctttct

SEQ ID NO: 14359 - RNA, 21 nt, synthetic construct
  source 1..21: mol_type = other RNA
agaaacacagccccaggtgga

SEQ ID NO: 14360 - RNA, 21 nt, synthetic construct
  source 1..21: mol_type = other RNA
agaaacggtggcccgtgtcag

SEQ ID NO: 14361 - RNA, 21 nt, synthetic construct
  source 1..21: mol_type = other RNA
agaaactggccgggaatcaag

SEQ ID NO: 14362 - RNA, 21 nt, synthetic construct
  source 1..21: mol_type = other RNA
agaaagagaaagggagtagag

SEQ ID NO: 14363 - RNA, 21 nt, synthetic construct
  source 1..21: mol_type = other RNA
agaaagggagtagaggcggcc

SEQ ID NO: 14364 - RNA, 21 nt, synthetic construct
  source 1..21: mol_type = other RNA
agaaaggtgaagagccaaagt

SEQ ID NO: 14365 - RNA, 21 nt, synthetic construct
  source 1..21: mol_type = other RNA
agaacctgagctgctctgacg

SEQ ID NO: 14366 - RNA, 21 nt, synthetic construct
  source 1..21: mol_type = other RNA
agaactcaggaccaacttatt

SEQ ID NO: 14367 - RNA, 21 nt, synthetic construct
  source 1..21: mol_type = other RNA
agaacttgggaacagccacag

SEQ ID NO: 14368 - RNA, 21 nt, synthetic construct
  source 1..21: mol_type = other RNA
agaagagctgggggcctgggc

SEQ ID NO: 14369 - RNA, 21 nt, synthetic construct
  source 1..21: mol_type = other RNA
agaagcaggggagctgggttt

SEQ ID NO: 14370 - RNA, 21 nt, synthetic construct
  source 1..21: mol_type = other RNA
agaagcagtttggaaaaacaa

SEQ ID NO: 14371 - RNA, 21 nt, synthetic construct
  source 1..21: mol_type = other RNA
agaagcccagagcagggcctt

SEQ ID NO: 14372 - RNA, 21 nt, synthetic construct
  source 1..21: mol_type = other RNA
agaagccccctcccttccccg

SEQ ID NO: 14373 - RNA, 21 nt, synthetic construct
  source 1..21: mol_type = other RNA
agaaggatgcaggacgagaaa

SEQ ID NO: 14374 - RNA, 21 nt, synthetic construct
  source 1..21: mol_type = other RNA
agaaggatggagaaagagaaa

SEQ ID NO: 14375 - RNA, 21 nt, synthetic construct
  source 1..21: mol_type = other RNA
agaagggaatccctcctctct

SEQ ID NO: 14376 - RNA, 21 nt, synthetic construct
  source 1..21: mol_type = other RNA
agaataagttggtcctgagtt

SEQ ID NO: 14377 - RNA, 21 nt, synthetic construct
  source 1..21: mol_type = other RNA
agaatccacccaaaaggcagc

SEQ ID NO: 14378 - RNA, 21 nt, synthetic construct
  source 1..21: mol_type = other RNA
agaatcctggctccagcccct

SEQ ID NO: 14379 - RNA, 21 nt, synthetic construct
  source 1..21: mol_type = other RNA
agaatgagaaacggtggcccg

SEQ ID NO: 14380 - RNA, 21 nt, synthetic construct
  source 1..21: mol_type = other RNA
agaatggtgcgtcctaggtgt

SEQ ID NO: 14381 - RNA, 21 nt, synthetic construct
  source 1..21: mol_type = other RNA
agacacggcaaaacccccgtc

SEQ ID NO: 14382 - RNA, 21 nt, synthetic construct
  source 1..21: mol_type = other RNA
agacagctgcacacctgtgtg

SEQ ID NO: 14383 - RNA, 21 nt, synthetic construct
  source 1..21: mol_type = other RNA
agacagggctggggtggcctc

SEQ ID NO: 14384 - RNA, 21 nt, synthetic construct
  source 1..21: mol_type = other RNA
agacagtgaccaaccatccct

SEQ ID NO: 14385 - RNA, 21 nt, synthetic construct
  source 1..21: mol_type = other RNA
agacccacgagtccaggcccc

SEQ ID NO: 14386 - RNA, 21 nt, synthetic construct
  source 1..21: mol_type = other RNA
agacccaggggtccaggccca

SEQ ID NO: 14387 - RNA, 21 nt, synthetic construct
  source 1..21: mol_type = other RNA
agacctgacccaaacccagct

SEQ ID NO: 14388 - RNA, 21 nt, synthetic construct
  source 1..21: mol_type = other RNA
agacggccgcgtcagagcagc

SEQ ID NO: 14389 - RNA, 21 nt, synthetic construct
  source 1..21: mol_type = other RNA
agactagggaagaggttccag

SEQ ID NO: 14390 - RNA, 21 nt, synthetic construct
  source 1..21: mol_type = other RNA
agactcaggggcctgggcggg

SEQ ID NO: 14391 - RNA, 21 nt, synthetic construct
  source 1..21: mol_type = other RNA
agactgagccccgttcccctg

SEQ ID NO: 14392 - RNA, 21 nt, synthetic construct
  source 1..21: mol_type = other RNA
agagaaagggagtagaggcgg

SEQ ID NO: 14393 - RNA, 21 nt, synthetic construct
  source 1..21: mol_type = other RNA
agagaagagctgggggcctgg

SEQ ID NO: 14394 - RNA, 21 nt, synthetic construct
  source 1..21: mol_type = other RNA
agagacagtgaccaaccatcc

SEQ ID NO: 14395 - RNA, 21 nt, synthetic construct
  source 1..21: mol_type = other RNA
agagaggagggattcccttct

SEQ ID NO: 14396 - RNA, 21 nt, synthetic construct
  source 1..21: mol_type = other RNA
agagcaatgggcctttccctt

SEQ ID NO: 14397 - RNA, 21 nt, synthetic construct
  source 1..21: mol_type = other RNA
agagcagagccaggaacccct

SEQ ID NO: 14398 - RNA, 21 nt, synthetic construct
  source 1..21: mol_type = other RNA
agagcagctcaggttctggga

SEQ ID NO: 14399 - RNA, 21 nt, synthetic construct
  source 1..21: mol_type = other RNA
agagcagggccttagggaagc

SEQ ID NO: 14400 - RNA, 21 nt, synthetic construct
  source 1..21: mol_type = other RNA
agagcagggtcccgcttccct

SEQ ID NO: 14401 - RNA, 21 nt, synthetic construct
  source 1..21: mol_type = other RNA
agagcatgaggtcatggaaac

SEQ ID NO: 14402 - RNA, 21 nt, synthetic construct
  source 1..21: mol_type = other RNA
agagccaaagttagaactcag

SEQ ID NO: 14403 - RNA, 21 nt, synthetic construct
  source 1..21: mol_type = other RNA
agagccaggaacccctgtagg

SEQ ID NO: 14404 - RNA, 21 nt, synthetic construct
  source 1..21: mol_type = other RNA
agagccaggagtcctggcccc

SEQ ID NO: 14405 - RNA, 21 nt, synthetic construct
  source 1..21: mol_type = other RNA
agagccaggggcatgagatgg

SEQ ID NO: 14406 - RNA, 21 nt, synthetic construct
  source 1..21: mol_type = other RNA
agagctgggggcctgggctcc

SEQ ID NO: 14407 - RNA, 21 nt, synthetic construct
  source 1..21: mol_type = other RNA
agaggagaagcagtttggaaa

SEQ ID NO: 14408 - RNA, 21 nt, synthetic construct
  source 1..21: mol_type = other RNA
agaggagggattcccttctca

SEQ ID NO: 14409 - RNA, 21 nt, synthetic construct
  source 1..21: mol_type = other RNA
agaggccaccccagccctgtc

SEQ ID NO: 14410 - RNA, 21 nt, synthetic construct
  source 1..21: mol_type = other RNA
agaggccccaggccacctact

SEQ ID NO: 14411 - RNA, 21 nt, synthetic construct
  source 1..21: mol_type = other RNA
agaggcgctcaggcttccctg

SEQ ID NO: 14412 - RNA, 21 nt, synthetic construct
  source 1..21: mol_type = other RNA
agaggcggccacgacctggtg

SEQ ID NO: 14413 - RNA, 21 nt, synthetic construct
  source 1..21: mol_type = other RNA
agaggctgggggcctggactc

SEQ ID NO: 14414 - RNA, 21 nt, synthetic construct
  source 1..21: mol_type = other RNA
agaggctgttgggtcattttc

SEQ ID NO: 14415 - RNA, 21 nt, synthetic construct
  source 1..21: mol_type = other RNA
agagggagccacgaaaacaga

SEQ ID NO: 14416 - RNA, 21 nt, synthetic construct
  source 1..21: mol_type = other RNA
agagggggcctcagtgaactg

SEQ ID NO: 14417 - RNA, 21 nt, synthetic construct
  source 1..21: mol_type = other RNA
agaggggtgagacagctgcac

SEQ ID NO: 14418 - RNA, 21 nt, synthetic construct
  source 1..21: mol_type = other RNA
agagggtagcgcagggtggcc

SEQ ID NO: 14419 - RNA, 21 nt, synthetic construct
  source 1..21: mol_type = other RNA
agaggtgagggacttgggggg

SEQ ID NO: 14420 - RNA, 21 nt, synthetic construct
  source 1..21: mol_type = other RNA
agaggttccagcccctcctcc

SEQ ID NO: 14421 - RNA, 21 nt, synthetic construct
  source 1..21: mol_type = other RNA
agagtaggaggggctggagcc

SEQ ID NO: 14422 - RNA, 21 nt, synthetic construct
  source 1..21: mol_type = other RNA
agagtatctgctggggtggtt

SEQ ID NO: 14423 - RNA, 21 nt, synthetic construct
  source 1..21: mol_type = other RNA
agagtcacccagagacagtga

SEQ ID NO: 14424 - RNA, 21 nt, synthetic construct
  source 1..21: mol_type = other RNA
agagtccaggcccaacccctc

SEQ ID NO: 14425 - RNA, 21 nt, synthetic construct
  source 1..21: mol_type = other RNA
agagtccccagtgctatctgg

SEQ ID NO: 14426 - RNA, 21 nt, synthetic construct
  source 1..21: mol_type = other RNA
agagtgagtttgccaagcagt

SEQ ID NO: 14427 - RNA, 21 nt, synthetic construct
  source 1..21: mol_type = other RNA
agataaggccagtagccagcc

SEQ ID NO: 14428 - RNA, 21 nt, synthetic construct
  source 1..21: mol_type = other RNA
agatacgcctggttgcccagt

SEQ ID NO: 14429 - RNA, 21 nt, synthetic construct
  source 1..21: mol_type = other RNA
agatactctgcaggaacgaag

SEQ ID NO: 14430 - RNA, 21 nt, synthetic construct
  source 1..21: mol_type = other RNA
agatagcactggggactcttt

SEQ ID NO: 14431 - RNA, 21 nt, synthetic construct
  source 1..21: mol_type = other RNA
agatagccaggagtcctttcg

SEQ ID NO: 14432 - RNA, 21 nt, synthetic construct
  source 1..21: mol_type = other RNA
agatccacgggataaattacc

SEQ ID NO: 14433 - RNA, 21 nt, synthetic construct
  source 1..21: mol_type = other RNA
agatccagggacacggtgcta

SEQ ID NO: 14434 - RNA, 21 nt, synthetic construct
  source 1..21: mol_type = other RNA
agatgaaggagtccaggcccc

SEQ ID NO: 14435 - RNA, 21 nt, synthetic construct
  source 1..21: mol_type = other RNA
agatgagaagccccctccctt

SEQ ID NO: 14436 - RNA, 21 nt, synthetic construct
  source 1..21: mol_type = other RNA
agatgcctgaggcctgggcac

SEQ ID NO: 14437 - RNA, 21 nt, synthetic construct
  source 1..21: mol_type = other RNA
agatgggcagctttggagagg

SEQ ID NO: 14438 - RNA, 21 nt, synthetic construct
  source 1..21: mol_type = other RNA
agatggtggacgaggaagggg

SEQ ID NO: 14439 - RNA, 21 nt, synthetic construct
  source 1..21: mol_type = other RNA
agcaagtcgggactccagagg

SEQ ID NO: 14440 - RNA, 21 nt, synthetic construct
  source 1..21: mol_type = other RNA
agcaatgggcctttccctttc

SEQ ID NO: 14441 - RNA, 21 nt, synthetic construct
  source 1..21: mol_type = other RNA
agcacagggtggccttcctcc

SEQ ID NO: 14442 - RNA, 21 nt, synthetic construct
  source 1..21: mol_type = other RNA
agcaccaggatcagtgaaacg

SEQ ID NO: 14443 - RNA, 21 nt, synthetic construct
  source 1..21: mol_type = other RNA
agcaccgtgtccctggatctg

SEQ ID NO: 14444 - RNA, 21 nt, synthetic construct
  source 1..21: mol_type = other RNA
agcactgaaaccctcagtcct

SEQ ID NO: 14445 - RNA, 21 nt, synthetic construct
  source 1..21: mol_type = other RNA
agcactgaaggcctggccggc

SEQ ID NO: 14446 - RNA, 21 nt, synthetic construct
  source 1..21: mol_type = other RNA
agcactggaagcgccacctgt

SEQ ID NO: 14447 - RNA, 21 nt, synthetic construct
  source 1..21: mol_type = other RNA
agcactggggactctttaagg

SEQ ID NO: 14448 - RNA, 21 nt, synthetic construct
  source 1..21: mol_type = other RNA
agcagagccaggaacccctgt

SEQ ID NO: 14449 - RNA, 21 nt, synthetic construct
  source 1..21: mol_type = other RNA
agcagatactctgcaggaacg

SEQ ID NO: 14450 - RNA, 21 nt, synthetic construct
  source 1..21: mol_type = other RNA
agcagctcaggttctgggaga

SEQ ID NO: 14451 - RNA, 21 nt, synthetic construct
  source 1..21: mol_type = other RNA
agcagggccttagggaagcgg

SEQ ID NO: 14452 - RNA, 21 nt, synthetic construct
  source 1..21: mol_type = other RNA
agcaggggagctgggtttggg

SEQ ID NO: 14453 - RNA, 21 nt, synthetic construct
  source 1..21: mol_type = other RNA
agcaggggggcgatgcttggg

SEQ ID NO: 14454 - RNA, 21 nt, synthetic construct
  source 1..21: mol_type = other RNA
agcagggtcccgcttccctaa

SEQ ID NO: 14455 - RNA, 21 nt, synthetic construct
  source 1..21: mol_type = other RNA
agcagtcaccccacagttgga

SEQ ID NO: 14456 - RNA, 21 nt, synthetic construct
  source 1..21: mol_type = other RNA
agcagtttggaaaaacaaaat

SEQ ID NO: 14457 - RNA, 21 nt, synthetic construct
  source 1..21: mol_type = other RNA
agcataagctggtcaccccac

SEQ ID NO: 14458 - RNA, 21 nt, synthetic construct
  source 1..21: mol_type = other RNA
agcatcgcccccctgctgtgg

SEQ ID NO: 14459 - RNA, 21 nt, synthetic construct
  source 1..21: mol_type = other RNA
agcatgaggtcatggaaactc

SEQ ID NO: 14460 - RNA, 21 nt, synthetic construct
  source 1..21: mol_type = other RNA
agcattggggtgggctggggt

SEQ ID NO: 14461 - RNA, 21 nt, synthetic construct
  source 1..21: mol_type = other RNA
agccaaagttagaactcagga

SEQ ID NO: 14462 - RNA, 21 nt, synthetic construct
  source 1..21: mol_type = other RNA
agccacagcaggggggcgatg

SEQ ID NO: 14463 - RNA, 21 nt, synthetic construct
  source 1..21: mol_type = other RNA
agccacgaaaacagatccagg

SEQ ID NO: 14464 - RNA, 21 nt, synthetic construct
  source 1..21: mol_type = other RNA
agccacggtgtcccagcaagt

SEQ ID NO: 14465 - RNA, 21 nt, synthetic construct
  source 1..21: mol_type = other RNA
agccactaaggcaattggggt

SEQ ID NO: 14466 - RNA, 21 nt, synthetic construct
  source 1..21: mol_type = other RNA
agccagccccgtcctggcagg

SEQ ID NO: 14467 - RNA, 21 nt, synthetic construct
  source 1..21: mol_type = other RNA
agccaggaacccctgtaggga

SEQ ID NO: 14468 - RNA, 21 nt, synthetic construct
  source 1..21: mol_type = other RNA
agccaggagtcctggccccca

SEQ ID NO: 14469 - RNA, 21 nt, synthetic construct
  source 1..21: mol_type = other RNA
agccaggagtcctttcgtggt

SEQ ID NO: 14470 - RNA, 21 nt, synthetic construct
  source 1..21: mol_type = other RNA
agccaggattcttagggctga

SEQ ID NO: 14471 - RNA, 21 nt, synthetic construct
  source 1..21: mol_type = other RNA
agccaggggcatgagatggtg

SEQ ID NO: 14472 - RNA, 21 nt, synthetic construct
  source 1..21: mol_type = other RNA
agccaggggctgacacgggcc

SEQ ID NO: 14473 - RNA, 21 nt, synthetic construct
  source 1..21: mol_type = other RNA
agccaggtccttccaagggtc

SEQ ID NO: 14474 - RNA, 21 nt, synthetic construct
  source 1..21: mol_type = other RNA
agccagtggccagaggctgtt

SEQ ID NO: 14475 - RNA, 21 nt, synthetic construct
  source 1..21: mol_type = other RNA
agcccacccagtgtccacaag

SEQ ID NO: 14476 - RNA, 21 nt, synthetic construct
  source 1..21: mol_type = other RNA
agcccaccccaatgctccagg

SEQ ID NO: 14477 - RNA, 21 nt, synthetic construct
  source 1..21: mol_type = other RNA
agcccagagcagggccttagg

SEQ ID NO: 14478 - RNA, 21 nt, synthetic construct
  source 1..21: mol_type = other RNA
agcccaggagaggcgctcagg

SEQ ID NO: 14479 - RNA, 21 nt, synthetic construct
  source 1..21: mol_type = other RNA
agcccaggcccccagctcttc

SEQ ID NO: 14480 - RNA, 21 nt, synthetic construct
  source 1..21: mol_type = other RNA
agccccaggtggagaaactgg

SEQ ID NO: 14481 - RNA, 21 nt, synthetic construct
  source 1..21: mol_type = other RNA
agcccccaaccccctagccac

SEQ ID NO: 14482 - RNA, 21 nt, synthetic construct
  source 1..21: mol_type = other RNA
agccccctcccttccccgttc

SEQ ID NO: 14483 - RNA, 21 nt, synthetic construct
  source 1..21: mol_type = other RNA
agccccgcctccctaagaccc

SEQ ID NO: 14484 - RNA, 21 nt, synthetic construct
  source 1..21: mol_type = other RNA
agccccgtcctggcagggctg

SEQ ID NO: 14485 - RNA, 21 nt, synthetic construct
  source 1..21: mol_type = other RNA
agccccgttcccctgcatccc

SEQ ID NO: 14486 - RNA, 21 nt, synthetic construct
  source 1..21: mol_type = other RNA
agcccctcctactctagcccc

SEQ ID NO: 14487 - RNA, 21 nt, synthetic construct
  source 1..21: mol_type = other RNA
agcccctcctccctcagaccc

SEQ ID NO: 14488 - RNA, 21 nt, synthetic construct
  source 1..21: mol_type = other RNA
agcccctcctccttcagagcc

SEQ ID NO: 14489 - RNA, 21 nt, synthetic construct
  source 1..21: mol_type = other RNA
agcccctcctctctcaaaccc

SEQ ID NO: 14490 - RNA, 21 nt, synthetic construct
  source 1..21: mol_type = other RNA
agcccctcctgccttaaaccc

SEQ ID NO: 14491 - RNA, 21 nt, synthetic construct
  source 1..21: mol_type = other RNA
agcccctggctgcagggcccc

SEQ ID NO: 14492 - RNA, 21 nt, synthetic construct
  source 1..21: mol_type = other RNA
agcccgagtttccatgacctc

SEQ ID NO: 14493 - RNA, 21 nt, synthetic construct
  source 1..21: mol_type = other RNA
agccctaagaatcctggctcc

SEQ ID NO: 14494 - RNA, 21 nt, synthetic construct
  source 1..21: mol_type = other RNA
agccctgccaggacggggctg

SEQ ID NO: 14495 - RNA, 21 nt, synthetic construct
  source 1..21: mol_type = other RNA
agccctgggcccacggcttcg

SEQ ID NO: 14496 - RNA, 21 nt, synthetic construct
  source 1..21: mol_type = other RNA
agccctgtctaccaggctgcc

SEQ ID NO: 14497 - RNA, 21 nt, synthetic construct
  source 1..21: mol_type = other RNA
agcccttccgccctcagatga

SEQ ID NO: 14498 - RNA, 21 nt, synthetic construct
  source 1..21: mol_type = other RNA
agccgaagtccagggggtcgg

SEQ ID NO: 14499 - RNA, 21 nt, synthetic construct
  source 1..21: mol_type = other RNA
agccgagttcatcccgttccc

SEQ ID NO: 14500 - RNA, 21 nt, synthetic construct
  source 1..21: mol_type = other RNA
agccgtgggcccagggctatg

SEQ ID NO: 14501 - RNA, 21 nt, synthetic construct
  source 1..21: mol_type = other RNA
agcctagttttagcactgaaa

SEQ ID NO: 14502 - RNA, 21 nt, synthetic construct
  source 1..21: mol_type = other RNA
agcctcaccaagtggttgata

SEQ ID NO: 14503 - RNA, 21 nt, synthetic construct
  source 1..21: mol_type = other RNA
agcctctccccattcagaccc

SEQ ID NO: 14504 - RNA, 21 nt, synthetic construct
  source 1..21: mol_type = other RNA
agcctctggccactggctgtt

SEQ ID NO: 14505 - RNA, 21 nt, synthetic construct
  source 1..21: mol_type = other RNA
agcctgagcgcctctcctggg

SEQ ID NO: 14506 - RNA, 21 nt, synthetic construct
  source 1..21: mol_type = other RNA
agcctggggcccaggcacaca

SEQ ID NO: 14507 - RNA, 21 nt, synthetic construct
  source 1..21: mol_type = other RNA
agcctggtagacagggctggg

SEQ ID NO: 14508 - RNA, 21 nt, synthetic construct
  source 1..21: mol_type = other RNA
agcgcagggtggccactgaga

SEQ ID NO: 14509 - RNA, 21 nt, synthetic construct
  source 1..21: mol_type = other RNA
agcgccacctgtgggtggtga

SEQ ID NO: 14510 - RNA, 21 nt, synthetic construct
  source 1..21: mol_type = other RNA
agcgcctctcctgggcttgcc

SEQ ID NO: 14511 - RNA, 21 nt, synthetic construct
  source 1..21: mol_type = other RNA
agcgggaccctgctctgggcg

SEQ ID NO: 14512 - RNA, 21 nt, synthetic construct
  source 1..21: mol_type = other RNA
agctaaactcctagatccacg

SEQ ID NO: 14513 - RNA, 21 nt, synthetic construct
  source 1..21: mol_type = other RNA
agctacgagggccaagagcat

SEQ ID NO: 14514 - RNA, 21 nt, synthetic construct
  source 1..21: mol_type = other RNA
agctcaggttctgggagaggg

SEQ ID NO: 14515 - RNA, 21 nt, synthetic construct
  source 1..21: mol_type = other RNA
agctccagttcaggtcccgga

SEQ ID NO: 14516 - RNA, 21 nt, synthetic construct
  source 1..21: mol_type = other RNA
agctcccctgcttcttggcca

SEQ ID NO: 14517 - RNA, 21 nt, synthetic construct
  source 1..21: mol_type = other RNA
agctccctcccgcctcctcca

SEQ ID NO: 14518 - RNA, 21 nt, synthetic construct
  source 1..21: mol_type = other RNA
agctcggaaaccaccccagca

SEQ ID NO: 14519 - RNA, 21 nt, synthetic construct
  source 1..21: mol_type = other RNA
agctcttctctgttcagccct

SEQ ID NO: 14520 - RNA, 21 nt, synthetic construct
  source 1..21: mol_type = other RNA
agctgaggaaggagtgaagct

SEQ ID NO: 14521 - RNA, 21 nt, synthetic construct
  source 1..21: mol_type = other RNA
agctgcacacctgtgtgcctg

SEQ ID NO: 14522 - RNA, 21 nt, synthetic construct
  source 1..21: mol_type = other RNA
agctgcagcaccaggatcagt

SEQ ID NO: 14523 - RNA, 21 nt, synthetic construct
  source 1..21: mol_type = other RNA
agctgcccatctggaggaggc

SEQ ID NO: 14524 - RNA, 21 nt, synthetic construct
  source 1..21: mol_type = other RNA
agctgctctgacgcggccgtc

SEQ ID NO: 14525 - RNA, 21 nt, synthetic construct
  source 1..21: mol_type = other RNA
agctgggggcctgggctcctg

SEQ ID NO: 14526 - RNA, 21 nt, synthetic construct
  source 1..21: mol_type = other RNA
agctgggtttgggtcaggtct

SEQ ID NO: 14527 - RNA, 21 nt, synthetic construct
  source 1..21: mol_type = other RNA
agctggtcaccccacacccag

SEQ ID NO: 14528 - RNA, 21 nt, synthetic construct
  source 1..21: mol_type = other RNA
agctgtctcacccctctggga

SEQ ID NO: 14529 - RNA, 21 nt, synthetic construct
  source 1..21: mol_type = other RNA
agcttatgctgtttgcccagg

SEQ ID NO: 14530 - RNA, 21 nt, synthetic construct
  source 1..21: mol_type = other RNA
agcttcactccttcctcagct

SEQ ID NO: 14531 - RNA, 21 nt, synthetic construct
  source 1..21: mol_type = other RNA
agcttccttacacttcccaag

SEQ ID NO: 14532 - RNA, 21 nt, synthetic construct
  source 1..21: mol_type = other RNA
agcttgacccttggaaggacc

SEQ ID NO: 14533 - RNA, 21 nt, synthetic construct
  source 1..21: mol_type = other RNA
agctttggagaggtgagggac

SEQ ID NO: 14534 - RNA, 21 nt, synthetic construct
  source 1..21: mol_type = other RNA
aggaaaacagggatggttggt

SEQ ID NO: 14535 - RNA, 21 nt, synthetic construct
  source 1..21: mol_type = other RNA
aggaaagaaggatggagaaag

SEQ ID NO: 14536 - RNA, 21 nt, synthetic construct
  source 1..21: mol_type = other RNA
aggaacaatataaattgggga

SEQ ID NO: 14537 - RNA, 21 nt, synthetic construct
  source 1..21: mol_type = other RNA
aggaacccctgtagggaaggg

SEQ ID NO: 14538 - RNA, 21 nt, synthetic construct
  source 1..21: mol_type = other RNA
aggaacgaagccgtgggccca

SEQ ID NO: 14539 - RNA, 21 nt, synthetic construct
  source 1..21: mol_type = other RNA
aggaagctgcagcaccaggat

SEQ ID NO: 14540 - RNA, 21 nt, synthetic construct
  source 1..21: mol_type = other RNA
aggaaggagtgaagctaaact

SEQ ID NO: 14541 - RNA, 21 nt, synthetic construct
  source 1..21: mol_type = other RNA
aggaaggccaccctgtgctgg

SEQ ID NO: 14542 - RNA, 21 nt, synthetic construct
  source 1..21: mol_type = other RNA
aggaagggggacagggaagcc

SEQ ID NO: 14543 - RNA, 21 nt, synthetic construct
  source 1..21: mol_type = other RNA
aggaagtgaacggggaaggga

SEQ ID NO: 14544 - RNA, 21 nt, synthetic construct
  source 1..21: mol_type = other RNA
aggaatatgtcccagatagca

SEQ ID NO: 14545 - RNA, 21 nt, synthetic construct
  source 1..21: mol_type = other RNA
aggaatgggggcagggtacca

SEQ ID NO: 14546 - RNA, 21 nt, synthetic construct
  source 1..21: mol_type = other RNA
aggacagcctagttttagcac

SEQ ID NO: 14547 - RNA, 21 nt, synthetic construct
  source 1..21: mol_type = other RNA
aggacagtggggaaaatgacc

SEQ ID NO: 14548 - RNA, 21 nt, synthetic construct
  source 1..21: mol_type = other RNA
aggaccaacttattctgattt

SEQ ID NO: 14549 - RNA, 21 nt, synthetic construct
  source 1..21: mol_type = other RNA
aggacctgcccagtacaggca

SEQ ID NO: 14550 - RNA, 21 nt, synthetic construct
  source 1..21: mol_type = other RNA
aggacctggctgggtttaagg

SEQ ID NO: 14551 - RNA, 21 nt, synthetic construct
  source 1..21: mol_type = other RNA
aggacgagaaacacagcccca

SEQ ID NO: 14552 - RNA, 21 nt, synthetic construct
  source 1..21: mol_type = other RNA
aggacgcaccattctcacaaa

SEQ ID NO: 14553 - RNA, 21 nt, synthetic construct
  source 1..21: mol_type = other RNA
aggacggggctggctactggc

SEQ ID NO: 14554 - RNA, 21 nt, synthetic construct
  source 1..21: mol_type = other RNA
aggactcaaacccagaagccc

SEQ ID NO: 14555 - RNA, 21 nt, synthetic construct
  source 1..21: mol_type = other RNA
aggactcctggctatctgcaa

SEQ ID NO: 14556 - RNA, 21 nt, synthetic construct
  source 1..21: mol_type = other RNA
aggactcctggctctgaagga

SEQ ID NO: 14557 - RNA, 21 nt, synthetic construct
  source 1..21: mol_type = other RNA
aggactgagggtttcagtgct

SEQ ID NO: 14558 - RNA, 21 nt, synthetic construct
  source 1..21: mol_type = other RNA
aggagaagcagtttggaaaaa

SEQ ID NO: 14559 - RNA, 21 nt, synthetic construct
  source 1..21: mol_type = other RNA
aggagaatccacccaaaaggc

SEQ ID NO: 14560 - RNA, 21 nt, synthetic construct
  source 1..21: mol_type = other RNA
aggagagcaatgggcctttcc

SEQ ID NO: 14561 - RNA, 21 nt, synthetic construct
  source 1..21: mol_type = other RNA
aggagagccaggggcatgaga

SEQ ID NO: 14562 - RNA, 21 nt, synthetic construct
  source 1..21: mol_type = other RNA
aggagaggcgctcaggcttcc

SEQ ID NO: 14563 - RNA, 21 nt, synthetic construct
  source 1..21: mol_type = other RNA
aggagcccaggcccccagctc

SEQ ID NO: 14564 - RNA, 21 nt, synthetic construct
  source 1..21: mol_type = other RNA
aggaggaggggctggaacctc

SEQ ID NO: 14565 - RNA, 21 nt, synthetic construct
  source 1..21: mol_type = other RNA
aggaggccaggccccagccct

SEQ ID NO: 14566 - RNA, 21 nt, synthetic construct
  source 1..21: mol_type = other RNA
aggaggcctggagcattgggg

SEQ ID NO: 14567 - RNA, 21 nt, synthetic construct
  source 1..21: mol_type = other RNA
aggaggcgggagggagctacg

SEQ ID NO: 14568 - RNA, 21 nt, synthetic construct
  source 1..21: mol_type = other RNA
aggagggacttgccccaggcc

SEQ ID NO: 14569 - RNA, 21 nt, synthetic construct
  source 1..21: mol_type = other RNA
aggagggattcccttctcagg

SEQ ID NO: 14570 - RNA, 21 nt, synthetic construct
  source 1..21: mol_type = other RNA
aggaggggctggaacctcttc

SEQ ID NO: 14571 - RNA, 21 nt, synthetic construct
  source 1..21: mol_type = other RNA
aggaggggctggagccaggat

SEQ ID NO: 14572 - RNA, 21 nt, synthetic construct
  source 1..21: mol_type = other RNA
aggaggggctggggcctggac

SEQ ID NO: 14573 - RNA, 21 nt, synthetic construct
  source 1..21: mol_type = other RNA
aggaggggctgggggccagga

SEQ ID NO: 14574 - RNA, 21 nt, synthetic construct
  source 1..21: mol_type = other RNA
aggaggggggtgtccgtgtgg

SEQ ID NO: 14575 - RNA, 21 nt, synthetic construct
  source 1..21: mol_type = other RNA
aggagtccaggcccccagcct

SEQ ID NO: 14576 - RNA, 21 nt, synthetic construct
  source 1..21: mol_type = other RNA
aggagtccaggcccccagtcc

SEQ ID NO: 14577 - RNA, 21 nt, synthetic construct
  source 1..21: mol_type = other RNA
aggagtcctggcccccagccc

SEQ ID NO: 14578 - RNA, 21 nt, synthetic construct
  source 1..21: mol_type = other RNA
aggagtcctttcgtggtttcc

SEQ ID NO: 14579 - RNA, 21 nt, synthetic construct
  source 1..21: mol_type = other RNA
aggagtgaagctaaactccta

SEQ ID NO: 14580 - RNA, 21 nt, synthetic construct
  source 1..21: mol_type = other RNA
aggagtttagcttcactcctt

SEQ ID NO: 14581 - RNA, 21 nt, synthetic construct
  source 1..21: mol_type = other RNA
aggatcagtgaaacgcaccag

SEQ ID NO: 14582 - RNA, 21 nt, synthetic construct
  source 1..21: mol_type = other RNA
aggatgcaggacgagaaacac

SEQ ID NO: 14583 - RNA, 21 nt, synthetic construct
  source 1..21: mol_type = other RNA
aggatggagaaagagaaaggg

SEQ ID NO: 14584 - RNA, 21 nt, synthetic construct
  source 1..21: mol_type = other RNA
aggattcttagggctgaacag

SEQ ID NO: 14585 - RNA, 21 nt, synthetic construct
  source 1..21: mol_type = other RNA
aggcaattggggtgcaggaat

SEQ ID NO: 14586 - RNA, 21 nt, synthetic construct
  source 1..21: mol_type = other RNA
aggcacacaggtgtgcagctg

SEQ ID NO: 14587 - RNA, 21 nt, synthetic construct
  source 1..21: mol_type = other RNA
aggcagcctggtagacagggc

SEQ ID NO: 14588 - RNA, 21 nt, synthetic construct
  source 1..21: mol_type = other RNA
aggcaggaggggctgggggcc

SEQ ID NO: 14589 - RNA, 21 nt, synthetic construct
  source 1..21: mol_type = other RNA
aggcaggtccccaagcatcgc

SEQ ID NO: 14590 - RNA, 21 nt, synthetic construct
  source 1..21: mol_type = other RNA
aggcatccctgtgaaagatgc

SEQ ID NO: 14591 - RNA, 21 nt, synthetic construct
  source 1..21: mol_type = other RNA
aggcatctttcacagggatgc

SEQ ID NO: 14592 - RNA, 21 nt, synthetic construct
  source 1..21: mol_type = other RNA
aggccaagtaggtggcctggg

SEQ ID NO: 14593 - RNA, 21 nt, synthetic construct
  source 1..21: mol_type = other RNA
aggccaccccagccctgtcta

SEQ ID NO: 14594 - RNA, 21 nt, synthetic construct
  source 1..21: mol_type = other RNA
aggccaccctgtgctgggaca

SEQ ID NO: 14595 - RNA, 21 nt, synthetic construct
  source 1..21: mol_type = other RNA
aggccacctacttggcctgga

SEQ ID NO: 14596 - RNA, 21 nt, synthetic construct
  source 1..21: mol_type = other RNA
aggccaggccccagcccttcc

SEQ ID NO: 14597 - RNA, 21 nt, synthetic construct
  source 1..21: mol_type = other RNA
aggccagtagccagccccgtc

SEQ ID NO: 14598 - RNA, 21 nt, synthetic construct
  source 1..21: mol_type = other RNA
aggcccaacccctccccattc

SEQ ID NO: 14599 - RNA, 21 nt, synthetic construct
  source 1..21: mol_type = other RNA
aggcccagccccgcctcccta

SEQ ID NO: 14600 - RNA, 21 nt, synthetic construct
  source 1..21: mol_type = other RNA
aggcccattgctctccttgcc

SEQ ID NO: 14601 - RNA, 21 nt, synthetic construct
  source 1..21: mol_type = other RNA
aggccccagcccctcctctct

SEQ ID NO: 14602 - RNA, 21 nt, synthetic construct
  source 1..21: mol_type = other RNA
aggccccagcccttccgccct

SEQ ID NO: 14603 - RNA, 21 nt, synthetic construct
  source 1..21: mol_type = other RNA
aggccccaggccacctacttg

SEQ ID NO: 14604 - RNA, 21 nt, synthetic construct
  source 1..21: mol_type = other RNA
aggcccccagcctctccccat

SEQ ID NO: 14605 - RNA, 21 nt, synthetic construct
  source 1..21: mol_type = other RNA
aggcccccagctcttctctgt

SEQ ID NO: 14606 - RNA, 21 nt, synthetic construct
  source 1..21: mol_type = other RNA
aggcccccagtccctccaccc

SEQ ID NO: 14607 - RNA, 21 nt, synthetic construct
  source 1..21: mol_type = other RNA
aggccccctctgcacggggcc

SEQ ID NO: 14608 - RNA, 21 nt, synthetic construct
  source 1..21: mol_type = other RNA
aggcccctgagtctgtcccag

SEQ ID NO: 14609 - RNA, 21 nt, synthetic construct
  source 1..21: mol_type = other RNA
aggccctgctctgggcttctg

SEQ ID NO: 14610 - RNA, 21 nt, synthetic construct
  source 1..21: mol_type = other RNA
aggccggccaggccttcagtg

SEQ ID NO: 14611 - RNA, 21 nt, synthetic construct
  source 1..21: mol_type = other RNA
aggcctcaggcatctttcaca

SEQ ID NO: 14612 - RNA, 21 nt, synthetic construct
  source 1..21: mol_type = other RNA
aggcctcctgggataccccga

SEQ ID NO: 14613 - RNA, 21 nt, synthetic construct
  source 1..21: mol_type = other RNA
aggcctggagcattggggtgg

SEQ ID NO: 14614 - RNA, 21 nt, synthetic construct
  source 1..21: mol_type = other RNA
aggcctggccggcctgaccac

SEQ ID NO: 14615 - RNA, 21 nt, synthetic construct
  source 1..21: mol_type = other RNA
aggcctgggcaccagggactc

SEQ ID NO: 14616 - RNA, 21 nt, synthetic construct
  source 1..21: mol_type = other RNA
aggcctggggcaagtccctcc

SEQ ID NO: 14617 - RNA, 21 nt, synthetic construct
  source 1..21: mol_type = other RNA
aggccttcagtgctcagtgga

SEQ ID NO: 14618 - RNA, 21 nt, synthetic construct
  source 1..21: mol_type = other RNA
aggccttgtggacactgggtg

SEQ ID NO: 14619 - RNA, 21 nt, synthetic construct
  source 1..21: mol_type = other RNA
aggcgctcaggcttccctgtc

SEQ ID NO: 14620 - RNA, 21 nt, synthetic construct
  source 1..21: mol_type = other RNA
aggcggccacgacctggtgaa

SEQ ID NO: 14621 - RNA, 21 nt, synthetic construct
  source 1..21: mol_type = other RNA
aggcgggagggagctacgagg

SEQ ID NO: 14622 - RNA, 21 nt, synthetic construct
  source 1..21: mol_type = other RNA
aggcggggctgggcctggacc

SEQ ID NO: 14623 - RNA, 21 nt, synthetic construct
  source 1..21: mol_type = other RNA
aggcgtatcttaaacagccag

SEQ ID NO: 14624 - RNA, 21 nt, synthetic construct
  source 1..21: mol_type = other RNA
aggctgccttttgggtggatt

SEQ ID NO: 14625 - RNA, 21 nt, synthetic construct
  source 1..21: mol_type = other RNA
aggctgggggcctggactcct

SEQ ID NO: 14626 - RNA, 21 nt, synthetic construct
  source 1..21: mol_type = other RNA
aggctggtaccctgcccccat

SEQ ID NO: 14627 - RNA, 21 nt, synthetic construct
  source 1..21: mol_type = other RNA
aggctgtcacactccagttca

SEQ ID NO: 14628 - RNA, 21 nt, synthetic construct
  source 1..21: mol_type = other RNA
aggctgtcctgggcaaacagc

SEQ ID NO: 14629 - RNA, 21 nt, synthetic construct
  source 1..21: mol_type = other RNA
aggctgttgggtcattttccc

SEQ ID NO: 14630 - RNA, 21 nt, synthetic construct
  source 1..21: mol_type = other RNA
aggcttccctgtcccccttcc

SEQ ID NO: 14631 - RNA, 21 nt, synthetic construct
  source 1..21: mol_type = other RNA
agggaaaggcccattgctctc

SEQ ID NO: 14632 - RNA, 21 nt, synthetic construct
  source 1..21: mol_type = other RNA
agggaagaatgagaaacggtg

SEQ ID NO: 14633 - RNA, 21 nt, synthetic construct
  source 1..21: mol_type = other RNA
agggaagaggttccagcccct

SEQ ID NO: 14634 - RNA, 21 nt, synthetic construct
  source 1..21: mol_type = other RNA
agggaagcctgagcgcctctc

SEQ ID NO: 14635 - RNA, 21 nt, synthetic construct
  source 1..21: mol_type = other RNA
agggaagcgggaccctgctct

SEQ ID NO: 14636 - RNA, 21 nt, synthetic construct
  source 1..21: mol_type = other RNA
agggaaggggcaggagagcca

SEQ ID NO: 14637 - RNA, 21 nt, synthetic construct
  source 1..21: mol_type = other RNA
agggaatccctcctctctgaa

SEQ ID NO: 14638 - RNA, 21 nt, synthetic construct
  source 1..21: mol_type = other RNA
agggacacggtgctaggacag

SEQ ID NO: 14639 - RNA, 21 nt, synthetic construct
  source 1..21: mol_type = other RNA
agggactccagagtccaggcc

SEQ ID NO: 14640 - RNA, 21 nt, synthetic construct
  source 1..21: mol_type = other RNA
agggactgggggcctggactc

SEQ ID NO: 14641 - RNA, 21 nt, synthetic construct
  source 1..21: mol_type = other RNA
agggacttgccccaggccttg

SEQ ID NO: 14642 - RNA, 21 nt, synthetic construct
  source 1..21: mol_type = other RNA
agggacttggggggtaattta

SEQ ID NO: 14643 - RNA, 21 nt, synthetic construct
  source 1..21: mol_type = other RNA
agggagccacgaaaacagatc

SEQ ID NO: 14644 - RNA, 21 nt, synthetic construct
  source 1..21: mol_type = other RNA
agggagctacgagggccaaga

SEQ ID NO: 14645 - RNA, 21 nt, synthetic construct
  source 1..21: mol_type = other RNA
agggaggaggggctggggcct

SEQ ID NO: 14646 - RNA, 21 nt, synthetic construct
  source 1..21: mol_type = other RNA
agggaggcggggctgggcctg

SEQ ID NO: 14647 - RNA, 21 nt, synthetic construct
  source 1..21: mol_type = other RNA
agggagggggcttctcatctg

SEQ ID NO: 14648 - RNA, 21 nt, synthetic construct
  source 1..21: mol_type = other RNA
agggagtagaggcggccacga

SEQ ID NO: 14649 - RNA, 21 nt, synthetic construct
  source 1..21: mol_type = other RNA
agggagttttccacacggaca

SEQ ID NO: 14650 - RNA, 21 nt, synthetic construct
  source 1..21: mol_type = other RNA
agggatgcctgtactgggcag

SEQ ID NO: 14651 - RNA, 21 nt, synthetic construct
  source 1..21: mol_type = other RNA
agggatggttggtcactgtct

SEQ ID NO: 14652 - RNA, 21 nt, synthetic construct
  source 1..21: mol_type = other RNA
agggattcccttctcaggtta

SEQ ID NO: 14653 - RNA, 21 nt, synthetic construct
  source 1..21: mol_type = other RNA
agggcacgtgcggccccttca

SEQ ID NO: 14654 - RNA, 21 nt, synthetic construct
  source 1..21: mol_type = other RNA
agggccaagagcatgaggtca

SEQ ID NO: 14655 - RNA, 21 nt, synthetic construct
  source 1..21: mol_type = other RNA
agggccccgtgcagagggggc

SEQ ID NO: 14656 - RNA, 21 nt, synthetic construct
  source 1..21: mol_type = other RNA
agggccttagggaagcgggac

SEQ ID NO: 14657 - RNA, 21 nt, synthetic construct
  source 1..21: mol_type = other RNA
agggcggaagggctggggcct

SEQ ID NO: 14658 - RNA, 21 nt, synthetic construct
  source 1..21: mol_type = other RNA
agggctatgcagggtggagga

SEQ ID NO: 14659 - RNA, 21 nt, synthetic construct
  source 1..21: mol_type = other RNA
agggctgaacagagaagagct

SEQ ID NO: 14660 - RNA, 21 nt, synthetic construct
  source 1..21: mol_type = other RNA
agggctggggcctggcctcct

SEQ ID NO: 14661 - RNA, 21 nt, synthetic construct
  source 1..21: mol_type = other RNA
agggctggggtggcctctcgt

SEQ ID NO: 14662 - RNA, 21 nt, synthetic construct
  source 1..21: mol_type = other RNA
agggctgtggtgaggaggggg

SEQ ID NO: 14663 - RNA, 21 nt, synthetic construct
  source 1..21: mol_type = other RNA
aggggaacggggatgcagggg

SEQ ID NO: 14664 - RNA, 21 nt, synthetic construct
  source 1..21: mol_type = other RNA
aggggaacggggctcagtctg

SEQ ID NO: 14665 - RNA, 21 nt, synthetic construct
  source 1..21: mol_type = other RNA
aggggaagggggatgcagggg

SEQ ID NO: 14666 - RNA, 21 nt, synthetic construct
  source 1..21: mol_type = other RNA
aggggagctgggtttgggtca

SEQ ID NO: 14667 - RNA, 21 nt, synthetic construct
  source 1..21: mol_type = other RNA
aggggaggggggcaaggagag

SEQ ID NO: 14668 - RNA, 21 nt, synthetic construct
  source 1..21: mol_type = other RNA
aggggcaggagagccaggggc

SEQ ID NO: 14669 - RNA, 21 nt, synthetic construct
  source 1..21: mol_type = other RNA
aggggcatgagatggtggacg

SEQ ID NO: 14670 - RNA, 21 nt, synthetic construct
  source 1..21: mol_type = other RNA
aggggccgcacgtgccctggg

SEQ ID NO: 14671 - RNA, 21 nt, synthetic construct
  source 1..21: mol_type = other RNA
aggggcctgggcgggactccc

SEQ ID NO: 14672 - RNA, 21 nt, synthetic construct
  source 1..21: mol_type = other RNA
aggggctgacacgggccaccg

SEQ ID NO: 14673 - RNA, 21 nt, synthetic construct
  source 1..21: mol_type = other RNA
aggggctggaacctcttccct

SEQ ID NO: 14674 - RNA, 21 nt, synthetic construct
  source 1..21: mol_type = other RNA
aggggctggagccaggattct

SEQ ID NO: 14675 - RNA, 21 nt, synthetic construct
  source 1..21: mol_type = other RNA
aggggctggggcctggactcg

SEQ ID NO: 14676 - RNA, 21 nt, synthetic construct
  source 1..21: mol_type = other RNA
aggggctgggggccaggactc

SEQ ID NO: 14677 - RNA, 21 nt, synthetic construct
  source 1..21: mol_type = other RNA
agggggacagggaagcctgag

SEQ ID NO: 14678 - RNA, 21 nt, synthetic construct
  source 1..21: mol_type = other RNA
agggggatgcaggggaacggg

SEQ ID NO: 14679 - RNA, 21 nt, synthetic construct
  source 1..21: mol_type = other RNA
agggggcctcagtgaactgga

SEQ ID NO: 14680 - RNA, 21 nt, synthetic construct
  source 1..21: mol_type = other RNA
agggggcttctcatctgggtg

SEQ ID NO: 14681 - RNA, 21 nt, synthetic construct
  source 1..21: mol_type = other RNA
aggggggcaaggagagcaatg

SEQ ID NO: 14682 - RNA, 21 nt, synthetic construct
  source 1..21: mol_type = other RNA
aggggggcgatgcttggggac

SEQ ID NO: 14683 - RNA, 21 nt, synthetic construct
  source 1..21: mol_type = other RNA
aggggggtgtccgtgtggaaa

SEQ ID NO: 14684 - RNA, 21 nt, synthetic construct
  source 1..21: mol_type = other RNA
agggggtcggaggagggactt

SEQ ID NO: 14685 - RNA, 21 nt, synthetic construct
  source 1..21: mol_type = other RNA
agggggttgggggctagagta

SEQ ID NO: 14686 - RNA, 21 nt, synthetic construct
  source 1..21: mol_type = other RNA
aggggtccaaaacttgggggg

SEQ ID NO: 14687 - RNA, 21 nt, synthetic construct
  source 1..21: mol_type = other RNA
aggggtccaggcccagccccg

SEQ ID NO: 14688 - RNA, 21 nt, synthetic construct
  source 1..21: mol_type = other RNA
aggggtgagacagctgcacac

SEQ ID NO: 14689 - RNA, 21 nt, synthetic construct
  source 1..21: mol_type = other RNA
aggggttcctggctctgctct

SEQ ID NO: 14690 - RNA, 21 nt, synthetic construct
  source 1..21: mol_type = other RNA
aggggttgggcctggactctg

SEQ ID NO: 14691 - RNA, 21 nt, synthetic construct
  source 1..21: mol_type = other RNA
agggtaccagcctcaccaagt

SEQ ID NO: 14692 - RNA, 21 nt, synthetic construct
  source 1..21: mol_type = other RNA
agggtaccccacgtgggttta

SEQ ID NO: 14693 - RNA, 21 nt, synthetic construct
  source 1..21: mol_type = other RNA
agggtagcgcagggtggccac

SEQ ID NO: 14694 - RNA, 21 nt, synthetic construct
  source 1..21: mol_type = other RNA
agggtcaagctcggaaaccac

SEQ ID NO: 14695 - RNA, 21 nt, synthetic construct
  source 1..21: mol_type = other RNA
agggtcccgcttccctaaggc

SEQ ID NO: 14696 - RNA, 21 nt, synthetic construct
  source 1..21: mol_type = other RNA
agggtggaggaaggccaccct

SEQ ID NO: 14697 - RNA, 21 nt, synthetic construct
  source 1..21: mol_type = other RNA
agggtggagggactgggggcc

SEQ ID NO: 14698 - RNA, 21 nt, synthetic construct
  source 1..21: mol_type = other RNA
agggtggccactgagaaccgg

SEQ ID NO: 14699 - RNA, 21 nt, synthetic construct
  source 1..21: mol_type = other RNA
agggtggccttcctccaccct

SEQ ID NO: 14700 - RNA, 21 nt, synthetic construct
  source 1..21: mol_type = other RNA
agggtttcagtgctaaaacta

SEQ ID NO: 14701 - RNA, 21 nt, synthetic construct
  source 1..21: mol_type = other RNA
aggtaaaactgacgcacggag

SEQ ID NO: 14702 - RNA, 21 nt, synthetic construct
  source 1..21: mol_type = other RNA
aggtaccatgtggggttcccg

SEQ ID NO: 14703 - RNA, 21 nt, synthetic construct
  source 1..21: mol_type = other RNA
aggtcatggaaactcgggctg

SEQ ID NO: 14704 - RNA, 21 nt, synthetic construct
  source 1..21: mol_type = other RNA
aggtccccaagcatcgccccc

SEQ ID NO: 14705 - RNA, 21 nt, synthetic construct
  source 1..21: mol_type = other RNA
aggtcccggagcccacccagt

SEQ ID NO: 14706 - RNA, 21 nt, synthetic construct
  source 1..21: mol_type = other RNA
aggtccttccaagggtcaagc

SEQ ID NO: 14707 - RNA, 21 nt, synthetic construct
  source 1..21: mol_type = other RNA
aggtccttgaaagggaaaggc

SEQ ID NO: 14708 - RNA, 21 nt, synthetic construct
  source 1..21: mol_type = other RNA
aggtcgtggccgcctctactc

SEQ ID NO: 14709 - RNA, 21 nt, synthetic construct
  source 1..21: mol_type = other RNA
aggtctgggtgtggggtgacc

SEQ ID NO: 14710 - RNA, 21 nt, synthetic construct
  source 1..21: mol_type = other RNA
aggtgaagagccaaagttaga

SEQ ID NO: 14711 - RNA, 21 nt, synthetic construct
  source 1..21: mol_type = other RNA
aggtgagggacttggggggta

SEQ ID NO: 14712 - RNA, 21 nt, synthetic construct
  source 1..21: mol_type = other RNA
aggtggagaaactggccggga

SEQ ID NO: 14713 - RNA, 21 nt, synthetic construct
  source 1..21: mol_type = other RNA
aggtggcctggggcctctggg

SEQ ID NO: 14714 - RNA, 21 nt, synthetic construct
  source 1..21: mol_type = other RNA
aggtggcgcttccagtgctca

SEQ ID NO: 14715 - RNA, 21 nt, synthetic construct
  source 1..21: mol_type = other RNA
aggtgtgcagctgtctcaccc

SEQ ID NO: 14716 - RNA, 21 nt, synthetic construct
  source 1..21: mol_type = other RNA
aggtgttcaccaggtcgtggc

SEQ ID NO: 14717 - RNA, 21 nt, synthetic construct
  source 1..21: mol_type = other RNA
aggttacgtggccaagaagca

SEQ ID NO: 14718 - RNA, 21 nt, synthetic construct
  source 1..21: mol_type = other RNA
aggttccagcccctcctcctt

SEQ ID NO: 14719 - RNA, 21 nt, synthetic construct
  source 1..21: mol_type = other RNA
aggttctgggagagggtagcg

SEQ ID NO: 14720 - RNA, 21 nt, synthetic construct
  source 1..21: mol_type = other RNA
agtacaggcatccctgtgaaa

SEQ ID NO: 14721 - RNA, 21 nt, synthetic construct
  source 1..21: mol_type = other RNA
agtagaggcggccacgacctg

SEQ ID NO: 14722 - RNA, 21 nt, synthetic construct
  source 1..21: mol_type = other RNA
agtagccagccccgtcctggc

SEQ ID NO: 14723 - RNA, 21 nt, synthetic construct
  source 1..21: mol_type = other RNA
agtaggaggggctggagccag

SEQ ID NO: 14724 - RNA, 21 nt, synthetic construct
  source 1..21: mol_type = other RNA
agtaggtggcctggggcctct

SEQ ID NO: 14725 - RNA, 21 nt, synthetic construct
  source 1..21: mol_type = other RNA
agtatctgctggggtggtttc

SEQ ID NO: 14726 - RNA, 21 nt, synthetic construct
  source 1..21: mol_type = other RNA
agtcacccagagacagtgacc

SEQ ID NO: 14727 - RNA, 21 nt, synthetic construct
  source 1..21: mol_type = other RNA
agtcaccccacagttggagga

SEQ ID NO: 14728 - RNA, 21 nt, synthetic construct
  source 1..21: mol_type = other RNA
agtccaggcccaacccctccc

SEQ ID NO: 14729 - RNA, 21 nt, synthetic construct
  source 1..21: mol_type = other RNA
agtccaggccccagcccctcc

SEQ ID NO: 14730 - RNA, 21 nt, synthetic construct
  source 1..21: mol_type = other RNA
agtccaggcccccagcctctc

SEQ ID NO: 14731 - RNA, 21 nt, synthetic construct
  source 1..21: mol_type = other RNA
agtccaggcccccagtccctc

SEQ ID NO: 14732 - RNA, 21 nt, synthetic construct
  source 1..21: mol_type = other RNA
agtccagggggtcggaggagg

SEQ ID NO: 14733 - RNA, 21 nt, synthetic construct
  source 1..21: mol_type = other RNA
agtccccaatttatattgttc

SEQ ID NO: 14734 - RNA, 21 nt, synthetic construct
  source 1..21: mol_type = other RNA
agtccccagtgctatctggga

SEQ ID NO: 14735 - RNA, 21 nt, synthetic construct
  source 1..21: mol_type = other RNA
agtcccgacttgctgggacac

SEQ ID NO: 14736 - RNA, 21 nt, synthetic construct
  source 1..21: mol_type = other RNA
agtcccgcccaggcccctgag

SEQ ID NO: 14737 - RNA, 21 nt, synthetic construct
  source 1..21: mol_type = other RNA
agtccctcacctctccaaagc

SEQ ID NO: 14738 - RNA, 21 nt, synthetic construct
  source 1..21: mol_type = other RNA
agtccctccaccctcagaccc

SEQ ID NO: 14739 - RNA, 21 nt, synthetic construct
  source 1..21: mol_type = other RNA
agtccctcctccgaccccctg

SEQ ID NO: 14740 - RNA, 21 nt, synthetic construct
  source 1..21: mol_type = other RNA
agtccctggtgcccaggcctc

SEQ ID NO: 14741 - RNA, 21 nt, synthetic construct
  source 1..21: mol_type = other RNA
agtcctaggaaaacagggatg

SEQ ID NO: 14742 - RNA, 21 nt, synthetic construct
  source 1..21: mol_type = other RNA
agtcctggcccccagcccctc

SEQ ID NO: 14743 - RNA, 21 nt, synthetic construct
  source 1..21: mol_type = other RNA
agtccttggcaagcccaggag

SEQ ID NO: 14744 - RNA, 21 nt, synthetic construct
  source 1..21: mol_type = other RNA
agtcctttcgtggtttccact

SEQ ID NO: 14745 - RNA, 21 nt, synthetic construct
  source 1..21: mol_type = other RNA
agtcgggactccagagggagc

SEQ ID NO: 14746 - RNA, 21 nt, synthetic construct
  source 1..21: mol_type = other RNA
agtctgaagagcagagccagg

SEQ ID NO: 14747 - RNA, 21 nt, synthetic construct
  source 1..21: mol_type = other RNA
agtctgagcactggaagcgcc

SEQ ID NO: 14748 - RNA, 21 nt, synthetic construct
  source 1..21: mol_type = other RNA
agtctgtcccagcacagggtg

SEQ ID NO: 14749 - RNA, 21 nt, synthetic construct
  source 1..21: mol_type = other RNA
agtgaaacgcaccagacggcc

SEQ ID NO: 14750 - RNA, 21 nt, synthetic construct
  source 1..21: mol_type = other RNA
agtgaacggggaagggagggg

SEQ ID NO: 14751 - RNA, 21 nt, synthetic construct
  source 1..21: mol_type = other RNA
agtgaactggagtgtgacagc

SEQ ID NO: 14752 - RNA, 21 nt, synthetic construct
  source 1..21: mol_type = other RNA
agtgaagctaaactcctagat

SEQ ID NO: 14753 - RNA, 21 nt, synthetic construct
  source 1..21: mol_type = other RNA
agtgaccaaccatccctgttt

SEQ ID NO: 14754 - RNA, 21 nt, synthetic construct
  source 1..21: mol_type = other RNA
agtgagtttgccaagcagtca

SEQ ID NO: 14755 - RNA, 21 nt, synthetic construct
  source 1..21: mol_type = other RNA
agtgctaaaactaggctgtcc

SEQ ID NO: 14756 - RNA, 21 nt, synthetic construct
  source 1..21: mol_type = other RNA
agtgctatctgggacatattc

SEQ ID NO: 14757 - RNA, 21 nt, synthetic construct
  source 1..21: mol_type = other RNA
agtgctcagactagggaagag

SEQ ID NO: 14758 - RNA, 21 nt, synthetic construct
  source 1..21: mol_type = other RNA
agtgctcagtggaaaccacga

SEQ ID NO: 14759 - RNA, 21 nt, synthetic construct
  source 1..21: mol_type = other RNA
agtggaaaccacgaaaggact

SEQ ID NO: 14760 - RNA, 21 nt, synthetic construct
  source 1..21: mol_type = other RNA
agtggccaccctgcgctaccc

SEQ ID NO: 14761 - RNA, 21 nt, synthetic construct
  source 1..21: mol_type = other RNA
agtggccagaggctgttgggt

SEQ ID NO: 14762 - RNA, 21 nt, synthetic construct
  source 1..21: mol_type = other RNA
agtggctagggggttgggggc

SEQ ID NO: 14763 - RNA, 21 nt, synthetic construct
  source 1..21: mol_type = other RNA
agtggggaaaatgacccaaca

SEQ ID NO: 14764 - RNA, 21 nt, synthetic construct
  source 1..21: mol_type = other RNA
agtggtcaggccggccaggcc

SEQ ID NO: 14765 - RNA, 21 nt, synthetic construct
  source 1..21: mol_type = other RNA
agtggttgataaacccacgtg

SEQ ID NO: 14766 - RNA, 21 nt, synthetic construct
  source 1..21: mol_type = other RNA
agtgtaaggaagctgcagcac

SEQ ID NO: 14767 - RNA, 21 nt, synthetic construct
  source 1..21: mol_type = other RNA
agtgtccacaaggcctggggc

SEQ ID NO: 14768 - RNA, 21 nt, synthetic construct
  source 1..21: mol_type = other RNA
agtgtgacagcctggggccca

SEQ ID NO: 14769 - RNA, 21 nt, synthetic construct
  source 1..21: mol_type = other RNA
agttagaactcaggaccaact

SEQ ID NO: 14770 - RNA, 21 nt, synthetic construct
  source 1..21: mol_type = other RNA
agttcactgaggccccctctg

SEQ ID NO: 14771 - RNA, 21 nt, synthetic construct
  source 1..21: mol_type = other RNA
agttcaggtcccggagcccac

SEQ ID NO: 14772 - RNA, 21 nt, synthetic construct
  source 1..21: mol_type = other RNA
agttcatcccgttcccagggc

SEQ ID NO: 14773 - RNA, 21 nt, synthetic construct
  source 1..21: mol_type = other RNA
agttctaactttggctcttca

SEQ ID NO: 14774 - RNA, 21 nt, synthetic construct
  source 1..21: mol_type = other RNA
agttcttagggtaccccacgt

SEQ ID NO: 14775 - RNA, 21 nt, synthetic construct
  source 1..21: mol_type = other RNA
agttggaggagaatccaccca

SEQ ID NO: 14776 - RNA, 21 nt, synthetic construct
  source 1..21: mol_type = other RNA
agttggtcctgagttctaact

SEQ ID NO: 14777 - RNA, 21 nt, synthetic construct
  source 1..21: mol_type = other RNA
agttgtcatggcgatagggga

SEQ ID NO: 14778 - RNA, 21 nt, synthetic construct
  source 1..21: mol_type = other RNA
agtttagcttcactccttcct

SEQ ID NO: 14779 - RNA, 21 nt, synthetic construct
  source 1..21: mol_type = other RNA
agtttccatgacctcatgctc

SEQ ID NO: 14780 - RNA, 21 nt, synthetic construct
  source 1..21: mol_type = other RNA
agtttctccacctggggctgt

SEQ ID NO: 14781 - RNA, 21 nt, synthetic construct
  source 1..21: mol_type = other RNA
agtttgccaagcagtcacccc

SEQ ID NO: 14782 - RNA, 21 nt, synthetic construct
  source 1..21: mol_type = other RNA
agttttacctgtgagataagg

SEQ ID NO: 14783 - RNA, 21 nt, synthetic construct
  source 1..21: mol_type = other RNA
agttttagcactgaaaccctc

SEQ ID NO: 14784 - RNA, 21 nt, synthetic construct
  source 1..21: mol_type = other RNA
agttttccacacggacacccc

SEQ ID NO: 14785 - RNA, 21 nt, synthetic construct
  source 1..21: mol_type = other RNA
agttttggacccctaagggaa

SEQ ID NO: 14786 - RNA, 21 nt, synthetic construct
  source 1..21: mol_type = other RNA
ataaacccacgtggggtaccc

SEQ ID NO: 14787 - RNA, 21 nt, synthetic construct
  source 1..21: mol_type = other RNA
ataaacgagccgagttcatcc

SEQ ID NO: 14788 - RNA, 21 nt, synthetic construct
  source 1..21: mol_type = other RNA
ataaattaccccccaagtccc

SEQ ID NO: 14789 - RNA, 21 nt, synthetic construct
  source 1..21: mol_type = other RNA
ataaattggggactagaaagg

SEQ ID NO: 14790 - RNA, 21 nt, synthetic construct
  source 1..21: mol_type = other RNA
ataagctggtcaccccacacc

SEQ ID NO: 14791 - RNA, 21 nt, synthetic construct
  source 1..21: mol_type = other RNA
ataaggccagtagccagcccc

SEQ ID NO: 14792 - RNA, 21 nt, synthetic construct
  source 1..21: mol_type = other RNA
ataagttggtcctgagttcta

SEQ ID NO: 14793 - RNA, 21 nt, synthetic construct
  source 1..21: mol_type = other RNA
ataccccgaagagtgagtttg

SEQ ID NO: 14794 - RNA, 21 nt, synthetic construct
  source 1..21: mol_type = other RNA
atacgcctggttgcccagtgg

SEQ ID NO: 14795 - RNA, 21 nt, synthetic construct
  source 1..21: mol_type = other RNA
atactctgcaggaacgaagcc

SEQ ID NO: 14796 - RNA, 21 nt, synthetic construct
  source 1..21: mol_type = other RNA
atagcactggggactctttaa

SEQ ID NO: 14797 - RNA, 21 nt, synthetic construct
  source 1..21: mol_type = other RNA
atagccaggagtcctttcgtg

SEQ ID NO: 14798 - RNA, 21 nt, synthetic construct
  source 1..21: mol_type = other RNA
atagccctgggcccacggctt

SEQ ID NO: 14799 - RNA, 21 nt, synthetic construct
  source 1..21: mol_type = other RNA
ataggggaggggggcaaggag

SEQ ID NO: 14800 - RNA, 21 nt, synthetic construct
  source 1..21: mol_type = other RNA
atataaattggggactagaaa

SEQ ID NO: 14801 - RNA, 21 nt, synthetic construct
  source 1..21: mol_type = other RNA
atatgtcccagatagcactgg

SEQ ID NO: 14802 - RNA, 21 nt, synthetic construct
  source 1..21: mol_type = other RNA
atattcctccgcccagagcag

SEQ ID NO: 14803 - RNA, 21 nt, synthetic construct
  source 1..21: mol_type = other RNA
atattgttcctccgtgcgtca

SEQ ID NO: 14804 - RNA, 21 nt, synthetic construct
  source 1..21: mol_type = other RNA
atcaaccacttggtgaggctg

SEQ ID NO: 14805 - RNA, 21 nt, synthetic construct
  source 1..21: mol_type = other RNA
atcaagagtcacccagagaca

SEQ ID NO: 14806 - RNA, 21 nt, synthetic construct
  source 1..21: mol_type = other RNA
atcagaataagttggtcctga

SEQ ID NO: 14807 - RNA, 21 nt, synthetic construct
  source 1..21: mol_type = other RNA
atcagtgaaacgcaccagacg

SEQ ID NO: 14808 - RNA, 21 nt, synthetic construct
  source 1..21: mol_type = other RNA
atccacccaaaaggcagcctg

SEQ ID NO: 14809 - RNA, 21 nt, synthetic construct
  source 1..21: mol_type = other RNA
atccacgggataaattacccc

SEQ ID NO: 14810 - RNA, 21 nt, synthetic construct
  source 1..21: mol_type = other RNA
atccagggacacggtgctagg

SEQ ID NO: 14811 - RNA, 21 nt, synthetic construct
  source 1..21: mol_type = other RNA
atcccaggaggcctggagcat

SEQ ID NO: 14812 - RNA, 21 nt, synthetic construct
  source 1..21: mol_type = other RNA
atcccccagaggccccaggcc

SEQ ID NO: 14813 - RNA, 21 nt, synthetic construct
  source 1..21: mol_type = other RNA
atcccccttcccctgcatccc

SEQ ID NO: 14814 - RNA, 21 nt, synthetic construct
  source 1..21: mol_type = other RNA
atccccgttcccctgcatccc

SEQ ID NO: 14815 - RNA, 21 nt, synthetic construct
  source 1..21: mol_type = other RNA
atcccgtggatctaggagttt

SEQ ID NO: 14816 - RNA, 21 nt, synthetic construct
  source 1..21: mol_type = other RNA
atcccgttcccagggcacgtg

SEQ ID NO: 14817 - RNA, 21 nt, synthetic construct
  source 1..21: mol_type = other RNA
atccctcctctctgaacccca

SEQ ID NO: 14818 - RNA, 21 nt, synthetic construct
  source 1..21: mol_type = other RNA
atccctgtgaaagatgcctga

SEQ ID NO: 14819 - RNA, 21 nt, synthetic construct
  source 1..21: mol_type = other RNA
atccctgttttcctaggactg

SEQ ID NO: 14820 - RNA, 21 nt, synthetic construct
  source 1..21: mol_type = other RNA
atcctggctccagcccctcct

SEQ ID NO: 14821 - RNA, 21 nt, synthetic construct
  source 1..21: mol_type = other RNA
atcctggtgctgcagcttcct

SEQ ID NO: 14822 - RNA, 21 nt, synthetic construct
  source 1..21: mol_type = other RNA
atccttctccaggcaggtccc

SEQ ID NO: 14823 - RNA, 21 nt, synthetic construct
  source 1..21: mol_type = other RNA
atccttctttccttaaagagt

SEQ ID NO: 14824 - RNA, 21 nt, synthetic construct
  source 1..21: mol_type = other RNA
atcgccatgacaactgggtgg

SEQ ID NO: 14825 - RNA, 21 nt, synthetic construct
  source 1..21: mol_type = other RNA
atcgcccccctgctgtggctg

SEQ ID NO: 14826 - RNA, 21 nt, synthetic construct
  source 1..21: mol_type = other RNA
atctaggagtttagcttcact

SEQ ID NO: 14827 - RNA, 21 nt, synthetic construct
  source 1..21: mol_type = other RNA
atctcacaggtaaaactgacg

SEQ ID NO: 14828 - RNA, 21 nt, synthetic construct
  source 1..21: mol_type = other RNA
atctcatgcccctggctctcc

SEQ ID NO: 14829 - RNA, 21 nt, synthetic construct
  source 1..21: mol_type = other RNA
atctgagggcggaagggctgg

SEQ ID NO: 14830 - RNA, 21 nt, synthetic construct
  source 1..21: mol_type = other RNA
atctgcaaacaggaagtgaac

SEQ ID NO: 14831 - RNA, 21 nt, synthetic construct
  source 1..21: mol_type = other RNA
atctgctggggtggtttccga

SEQ ID NO: 14832 - RNA, 21 nt, synthetic construct
  source 1..21: mol_type = other RNA
atctggaggaggcgggaggga

SEQ ID NO: 14833 - RNA, 21 nt, synthetic construct
  source 1..21: mol_type = other RNA
atctgggacatattcctccgc

SEQ ID NO: 14834 - RNA, 21 nt, synthetic construct
  source 1..21: mol_type = other RNA
atctgggtgcgggaaccccac

SEQ ID NO: 14835 - RNA, 21 nt, synthetic construct
  source 1..21: mol_type = other RNA
atctgttttcgtggctccctc

SEQ ID NO: 14836 - RNA, 21 nt, synthetic construct
  source 1..21: mol_type = other RNA
atcttaaacagccagtggcca

SEQ ID NO: 14837 - RNA, 21 nt, synthetic construct
  source 1..21: mol_type = other RNA
atctttcacagggatgcctgt

SEQ ID NO: 14838 - RNA, 21 nt, synthetic construct
  source 1..21: mol_type = other RNA
atgaactcggctcgtttattt

SEQ ID NO: 14839 - RNA, 21 nt, synthetic construct
  source 1..21: mol_type = other RNA
atgaaggagtccaggccccca

SEQ ID NO: 14840 - RNA, 21 nt, synthetic construct
  source 1..21: mol_type = other RNA
atgacaactgggtggaaataa

SEQ ID NO: 14841 - RNA, 21 nt, synthetic construct
  source 1..21: mol_type = other RNA
atgacccaacagcctctggcc

SEQ ID NO: 14842 - RNA, 21 nt, synthetic construct
  source 1..21: mol_type = other RNA
atgacctcatgctcttggccc

SEQ ID NO: 14843 - RNA, 21 nt, synthetic construct
  source 1..21: mol_type = other RNA
atgagaaacggtggcccgtgt

SEQ ID NO: 14844 - RNA, 21 nt, synthetic construct
  source 1..21: mol_type = other RNA
atgagaagccccctcccttcc

SEQ ID NO: 14845 - RNA, 21 nt, synthetic construct
  source 1..21: mol_type = other RNA
atgagatggtggacgaggaag

SEQ ID NO: 14846 - RNA, 21 nt, synthetic construct
  source 1..21: mol_type = other RNA
atgaggtcatggaaactcggg

SEQ ID NO: 14847 - RNA, 21 nt, synthetic construct
  source 1..21: mol_type = other RNA
atgcaggacgagaaacacagc

SEQ ID NO: 14848 - RNA, 21 nt, synthetic construct
  source 1..21: mol_type = other RNA
atgcaggggaacggggatgca

SEQ ID NO: 14849 - RNA, 21 nt, synthetic construct
  source 1..21: mol_type = other RNA
atgcaggggaacggggctcag

SEQ ID NO: 14850 - RNA, 21 nt, synthetic construct
  source 1..21: mol_type = other RNA
atgcaggggaagggggatgca

SEQ ID NO: 14851 - RNA, 21 nt, synthetic construct
  source 1..21: mol_type = other RNA
atgcagggtggaggaaggcca

SEQ ID NO: 14852 - RNA, 21 nt, synthetic construct
  source 1..21: mol_type = other RNA
atgcccctggctctcctgccc

SEQ ID NO: 14853 - RNA, 21 nt, synthetic construct
  source 1..21: mol_type = other RNA
atgcctgaggcctgggcacca

SEQ ID NO: 14854 - RNA, 21 nt, synthetic construct
  source 1..21: mol_type = other RNA
atgcctgtactgggcaggtcc

SEQ ID NO: 14855 - RNA, 21 nt, synthetic construct
  source 1..21: mol_type = other RNA
atgcgtgacctgcccggttct

SEQ ID NO: 14856 - RNA, 21 nt, synthetic construct
  source 1..21: mol_type = other RNA
atgctccaggcctcctgggat

SEQ ID NO: 14857 - RNA, 21 nt, synthetic construct
  source 1..21: mol_type = other RNA
atgctcttggccctcgtagct

SEQ ID NO: 14858 - RNA, 21 nt, synthetic construct
  source 1..21: mol_type = other RNA
atgctgtttgcccaggacagc

SEQ ID NO: 14859 - RNA, 21 nt, synthetic construct
  source 1..21: mol_type = other RNA
atgcttggggacctgcctgga

SEQ ID NO: 14860 - RNA, 21 nt, synthetic construct
  source 1..21: mol_type = other RNA
atggaaactcgggctgtgaag

SEQ ID NO: 14861 - RNA, 21 nt, synthetic construct
  source 1..21: mol_type = other RNA
atggagaaagagaaagggagt

SEQ ID NO: 14862 - RNA, 21 nt, synthetic construct
  source 1..21: mol_type = other RNA
atggcgataggggaggggggc

SEQ ID NO: 14863 - RNA, 21 nt, synthetic construct
  source 1..21: mol_type = other RNA
atgggcagctttggagaggtg

SEQ ID NO: 14864 - RNA, 21 nt, synthetic construct
  source 1..21: mol_type = other RNA
atgggcctttccctttcaagg

SEQ ID NO: 14865 - RNA, 21 nt, synthetic construct
  source 1..21: mol_type = other RNA
atggggagaggctgggggcct

SEQ ID NO: 14866 - RNA, 21 nt, synthetic construct
  source 1..21: mol_type = other RNA
atggggaggggttgggcctgg

SEQ ID NO: 14867 - RNA, 21 nt, synthetic construct
  source 1..21: mol_type = other RNA
atgggggcagggtaccagcct

SEQ ID NO: 14868 - RNA, 21 nt, synthetic construct
  source 1..21: mol_type = other RNA
atggtacctgttagacacggc

SEQ ID NO: 14869 - RNA, 21 nt, synthetic construct
  source 1..21: mol_type = other RNA
atggtgcgtcctaggtgttca

SEQ ID NO: 14870 - RNA, 21 nt, synthetic construct
  source 1..21: mol_type = other RNA
atggtggacgaggaaggggga

SEQ ID NO: 14871 - RNA, 21 nt, synthetic construct
  source 1..21: mol_type = other RNA
atggttggtcactgtctctgg

SEQ ID NO: 14872 - RNA, 21 nt, synthetic construct
  source 1..21: mol_type = other RNA
atgtcccagatagcactgggg

SEQ ID NO: 14873 - RNA, 21 nt, synthetic construct
  source 1..21: mol_type = other RNA
atgtggggttcccgcacccag

SEQ ID NO: 14874 - RNA, 21 nt, synthetic construct
  source 1..21: mol_type = other RNA
attaccccccaagtccctcac

SEQ ID NO: 14875 - RNA, 21 nt, synthetic construct
  source 1..21: mol_type = other RNA
attcaacccaggaggccaggc

SEQ ID NO: 14876 - RNA, 21 nt, synthetic construct
  source 1..21: mol_type = other RNA
attcagacccaggggtccagg

SEQ ID NO: 14877 - RNA, 21 nt, synthetic construct
  source 1..21: mol_type = other RNA
attcccggccagtttctccac

SEQ ID NO: 14878 - RNA, 21 nt, synthetic construct
  source 1..21: mol_type = other RNA
attcccttctcaggttacgtg

SEQ ID NO: 14879 - RNA, 21 nt, synthetic construct
  source 1..21: mol_type = other RNA
attcctccgcccagagcaggg

SEQ ID NO: 14880 - RNA, 21 nt, synthetic construct
  source 1..21: mol_type = other RNA
attcctgcaccccaattgcct

SEQ ID NO: 14881 - RNA, 21 nt, synthetic construct
  source 1..21: mol_type = other RNA
attctcacaaagggagttttc

SEQ ID NO: 14882 - RNA, 21 nt, synthetic construct
  source 1..21: mol_type = other RNA
attctcctccaactgtggggt

SEQ ID NO: 14883 - RNA, 21 nt, synthetic construct
  source 1..21: mol_type = other RNA
attctgattttgtttttccaa

SEQ ID NO: 14884 - RNA, 21 nt, synthetic construct
  source 1..21: mol_type = other RNA
attcttagggctgaacagaga

SEQ ID NO: 14885 - RNA, 21 nt, synthetic construct
  source 1..21: mol_type = other RNA
attcttcccttaggggtccaa

SEQ ID NO: 14886 - RNA, 21 nt, synthetic construct
  source 1..21: mol_type = other RNA
attgccttagtggctaggggg

SEQ ID NO: 14887 - RNA, 21 nt, synthetic construct
  source 1..21: mol_type = other RNA
attgctctccttgcccccctc

SEQ ID NO: 14888 - RNA, 21 nt, synthetic construct
  source 1..21: mol_type = other RNA
attggggactagaaaggtgaa

SEQ ID NO: 14889 - RNA, 21 nt, synthetic construct
  source 1..21: mol_type = other RNA
attggggtgcaggaatggggg

SEQ ID NO: 14890 - RNA, 21 nt, synthetic construct
  source 1..21: mol_type = other RNA
attggggtgggctggggttca

SEQ ID NO: 14891 - RNA, 21 nt, synthetic construct
  source 1..21: mol_type = other RNA
attgttcctccgtgcgtcagt

SEQ ID NO: 14892 - RNA, 21 nt, synthetic construct
  source 1..21: mol_type = other RNA
atttatattgttcctccgtgc

SEQ ID NO: 14893 - RNA, 21 nt, synthetic construct
  source 1..21: mol_type = other RNA
atttatcccgtggatctagga

SEQ ID NO: 14894 - RNA, 21 nt, synthetic construct
  source 1..21: mol_type = other RNA
atttccacccagttgtcatgg

SEQ ID NO: 14895 - RNA, 21 nt, synthetic construct
  source 1..21: mol_type = other RNA
attttccccactgtcctagca

SEQ ID NO: 14896 - RNA, 21 nt, synthetic construct
  source 1..21: mol_type = other RNA
attttgtttttccaaactgct

SEQ ID NO: 14897 - RNA, 21 nt, synthetic construct
  source 1..21: mol_type = other RNA
caaaacccccgtcaccaccca

SEQ ID NO: 14898 - RNA, 21 nt, synthetic construct
  source 1..21: mol_type = other RNA
caaaacttggggggacaaaag

SEQ ID NO: 14899 - RNA, 21 nt, synthetic construct
  source 1..21: mol_type = other RNA
caaaagccgaagtccaggggg

SEQ ID NO: 14900 - RNA, 21 nt, synthetic construct
  source 1..21: mol_type = other RNA
caaaaggcagcctggtagaca

SEQ ID NO: 14901 - RNA, 21 nt, synthetic construct
  source 1..21: mol_type = other RNA
caaaatcagaataagttggtc

SEQ ID NO: 14902 - RNA, 21 nt, synthetic construct
  source 1..21: mol_type = other RNA
caaacagcataagctggtcac

SEQ ID NO: 14903 - RNA, 21 nt, synthetic construct
  source 1..21: mol_type = other RNA
caaacaggaagtgaacgggga

SEQ ID NO: 14904 - RNA, 21 nt, synthetic construct
  source 1..21: mol_type = other RNA
caaacccagaagcccagagca

SEQ ID NO: 14905 - RNA, 21 nt, synthetic construct
  source 1..21: mol_type = other RNA
caaacccagctcccctgcttc

SEQ ID NO: 14906 - RNA, 21 nt, synthetic construct
  source 1..21: mol_type = other RNA
caaacccaggagcccaggccc

SEQ ID NO: 14907 - RNA, 21 nt, synthetic construct
  source 1..21: mol_type = other RNA
caaactcactcttcggggtat

SEQ ID NO: 14908 - RNA, 21 nt, synthetic construct
  source 1..21: mol_type = other RNA
caaactgcttctcctcttggg

SEQ ID NO: 14909 - RNA, 21 nt, synthetic construct
  source 1..21: mol_type = other RNA
caaagctgcccatctggagga

SEQ ID NO: 14910 - RNA, 21 nt, synthetic construct
  source 1..21: mol_type = other RNA
caaagggagttttccacacgg

SEQ ID NO: 14911 - RNA, 21 nt, synthetic construct
  source 1..21: mol_type = other RNA
caaagttagaactcaggacca

SEQ ID NO: 14912 - RNA, 21 nt, synthetic construct
  source 1..21: mol_type = other RNA
caacagcctctggccactggc

SEQ ID NO: 14913 - RNA, 21 nt, synthetic construct
  source 1..21: mol_type = other RNA
caaccacttggtgaggctggt

SEQ ID NO: 14914 - RNA, 21 nt, synthetic construct
  source 1..21: mol_type = other RNA
caaccaggcgtatcttaaaca

SEQ ID NO: 14915 - RNA, 21 nt, synthetic construct
  source 1..21: mol_type = other RNA
caaccatccctgttttcctag

SEQ ID NO: 14916 - RNA, 21 nt, synthetic construct
  source 1..21: mol_type = other RNA
caacccaggaggccaggcccc

SEQ ID NO: 14917 - RNA, 21 nt, synthetic construct
  source 1..21: mol_type = other RNA
caaccccctagccactaaggc

SEQ ID NO: 14918 - RNA, 21 nt, synthetic construct
  source 1..21: mol_type = other RNA
caacccctccccattcaaccc

SEQ ID NO: 14919 - RNA, 21 nt, synthetic construct
  source 1..21: mol_type = other RNA
caactgggtggaaataaacga

SEQ ID NO: 14920 - RNA, 21 nt, synthetic construct
  source 1..21: mol_type = other RNA
caactgtggggtgactgcttg

SEQ ID NO: 14921 - RNA, 21 nt, synthetic construct
  source 1..21: mol_type = other RNA
caacttattctgattttgttt

SEQ ID NO: 14922 - RNA, 21 nt, synthetic construct
  source 1..21: mol_type = other RNA
caagaagcaggggagctgggt

SEQ ID NO: 14923 - RNA, 21 nt, synthetic construct
  source 1..21: mol_type = other RNA
caagagcatgaggtcatggaa

SEQ ID NO: 14924 - RNA, 21 nt, synthetic construct
  source 1..21: mol_type = other RNA
caagaggagaagcagtttgga

SEQ ID NO: 14925 - RNA, 21 nt, synthetic construct
  source 1..21: mol_type = other RNA
caagagtcacccagagacagt

SEQ ID NO: 14926 - RNA, 21 nt, synthetic construct
  source 1..21: mol_type = other RNA
caagcagtcaccccacagttg

SEQ ID NO: 14927 - RNA, 21 nt, synthetic construct
  source 1..21: mol_type = other RNA
caagcatcgcccccctgctgt

SEQ ID NO: 14928 - RNA, 21 nt, synthetic construct
  source 1..21: mol_type = other RNA
caagcccaggagaggcgctca

SEQ ID NO: 14929 - RNA, 21 nt, synthetic construct
  source 1..21: mol_type = other RNA
caagctcggaaaccaccccag

SEQ ID NO: 14930 - RNA, 21 nt, synthetic construct
  source 1..21: mol_type = other RNA
caaggacctgcccagtacagg

SEQ ID NO: 14931 - RNA, 21 nt, synthetic construct
  source 1..21: mol_type = other RNA
caaggactcaaacccagaagc

SEQ ID NO: 14932 - RNA, 21 nt, synthetic construct
  source 1..21: mol_type = other RNA
caaggagagcaatgggccttt

SEQ ID NO: 14933 - RNA, 21 nt, synthetic construct
  source 1..21: mol_type = other RNA
caaggcctggggcaagtccct

SEQ ID NO: 14934 - RNA, 21 nt, synthetic construct
  source 1..21: mol_type = other RNA
caagggtcaagctcggaaacc

SEQ ID NO: 14935 - RNA, 21 nt, synthetic construct
  source 1..21: mol_type = other RNA
caagtaggtggcctggggcct

SEQ ID NO: 14936 - RNA, 21 nt, synthetic construct
  source 1..21: mol_type = other RNA
caagtccctcacctctccaaa

SEQ ID NO: 14937 - RNA, 21 nt, synthetic construct
  source 1..21: mol_type = other RNA
caagtccctcctccgaccccc

SEQ ID NO: 14938 - RNA, 21 nt, synthetic construct
  source 1..21: mol_type = other RNA
caagtcgggactccagaggga

SEQ ID NO: 14939 - RNA, 21 nt, synthetic construct
  source 1..21: mol_type = other RNA
caagtggttgataaacccacg

SEQ ID NO: 14940 - RNA, 21 nt, synthetic construct
  source 1..21: mol_type = other RNA
caagttcttagggtaccccac

SEQ ID NO: 14941 - RNA, 21 nt, synthetic construct
  source 1..21: mol_type = other RNA
caagttttggacccctaaggg

SEQ ID NO: 14942 - RNA, 21 nt, synthetic construct
  source 1..21: mol_type = other RNA
caatataaattggggactaga

SEQ ID NO: 14943 - RNA, 21 nt, synthetic construct
  source 1..21: mol_type = other RNA
caatgctccaggcctcctggg

SEQ ID NO: 14944 - RNA, 21 nt, synthetic construct
  source 1..21: mol_type = other RNA
caatgggcctttccctttcaa

SEQ ID NO: 14945 - RNA, 21 nt, synthetic construct
  source 1..21: mol_type = other RNA
caattgccttagtggctaggg

SEQ ID NO: 14946 - RNA, 21 nt, synthetic construct
  source 1..21: mol_type = other RNA
caattggggtgcaggaatggg

SEQ ID NO: 14947 - RNA, 21 nt, synthetic construct
  source 1..21: mol_type = other RNA
caatttatattgttcctccgt

SEQ ID NO: 14948 - RNA, 21 nt, synthetic construct
  source 1..21: mol_type = other RNA
cacaaagggagttttccacac

SEQ ID NO: 14949 - RNA, 21 nt, synthetic construct
  source 1..21: mol_type = other RNA
cacaaggcctggggcaagtcc

SEQ ID NO: 14950 - RNA, 21 nt, synthetic construct
  source 1..21: mol_type = other RNA
cacacaggtgtgcagctgtct

SEQ ID NO: 14951 - RNA, 21 nt, synthetic construct
  source 1..21: mol_type = other RNA
cacacccagacctgacccaaa

SEQ ID NO: 14952 - RNA, 21 nt, synthetic construct
  source 1..21: mol_type = other RNA
cacacctgtgtgcctgggccc

SEQ ID NO: 14953 - RNA, 21 nt, synthetic construct
  source 1..21: mol_type = other RNA
cacacggacacccccctcctc

SEQ ID NO: 14954 - RNA, 21 nt, synthetic construct
  source 1..21: mol_type = other RNA
cacactccagttcactgaggc

SEQ ID NO: 14955 - RNA, 21 nt, synthetic construct
  source 1..21: mol_type = other RNA
cacagcaggggggcgatgctt

SEQ ID NO: 14956 - RNA, 21 nt, synthetic construct
  source 1..21: mol_type = other RNA
cacagccccaggtggagaaac

SEQ ID NO: 14957 - RNA, 21 nt, synthetic construct
  source 1..21: mol_type = other RNA
cacagcccgagtttccatgac

SEQ ID NO: 14958 - RNA, 21 nt, synthetic construct
  source 1..21: mol_type = other RNA
cacagccctgccaggacgggg

SEQ ID NO: 14959 - RNA, 21 nt, synthetic construct
  source 1..21: mol_type = other RNA
cacagggatgcctgtactggg

SEQ ID NO: 14960 - RNA, 21 nt, synthetic construct
  source 1..21: mol_type = other RNA
cacagggtggccttcctccac

SEQ ID NO: 14961 - RNA, 21 nt, synthetic construct
  source 1..21: mol_type = other RNA
cacaggtaaaactgacgcacg

SEQ ID NO: 14962 - RNA, 21 nt, synthetic construct
  source 1..21: mol_type = other RNA
cacaggtggcgcttccagtgc

SEQ ID NO: 14963 - RNA, 21 nt, synthetic construct
  source 1..21: mol_type = other RNA
cacaggtgtgcagctgtctca

SEQ ID NO: 14964 - RNA, 21 nt, synthetic construct
  source 1..21: mol_type = other RNA
cacagttggaggagaatccac

SEQ ID NO: 14965 - RNA, 21 nt, synthetic construct
  source 1..21: mol_type = other RNA
cacatggtacctgttagacac

SEQ ID NO: 14966 - RNA, 21 nt, synthetic construct
  source 1..21: mol_type = other RNA
caccaagtggttgataaaccc

SEQ ID NO: 14967 - RNA, 21 nt, synthetic construct
  source 1..21: mol_type = other RNA
caccacagccctgccaggacg

SEQ ID NO: 14968 - RNA, 21 nt, synthetic construct
  source 1..21: mol_type = other RNA
caccacccacaggtggcgctt

SEQ ID NO: 14969 - RNA, 21 nt, synthetic construct
  source 1..21: mol_type = other RNA
caccagacggccgcgtcagag

SEQ ID NO: 14970 - RNA, 21 nt, synthetic construct
  source 1..21: mol_type = other RNA
caccaggatcagtgaaacgca

SEQ ID NO: 14971 - RNA, 21 nt, synthetic construct
  source 1..21: mol_type = other RNA
caccagggactccagagtcca

SEQ ID NO: 14972 - RNA, 21 nt, synthetic construct
  source 1..21: mol_type = other RNA
caccaggtcgtggccgcctct

SEQ ID NO: 14973 - RNA, 21 nt, synthetic construct
  source 1..21: mol_type = other RNA
caccatctcatgcccctggct

SEQ ID NO: 14974 - RNA, 21 nt, synthetic construct
  source 1..21: mol_type = other RNA
caccattctcacaaagggagt

SEQ ID NO: 14975 - RNA, 21 nt, synthetic construct
  source 1..21: mol_type = other RNA
cacccaaaaggcagcctggta

SEQ ID NO: 14976 - RNA, 21 nt, synthetic construct
  source 1..21: mol_type = other RNA
cacccacaggtggcgcttcca

SEQ ID NO: 14977 - RNA, 21 nt, synthetic construct
  source 1..21: mol_type = other RNA
cacccagacctgacccaaacc

SEQ ID NO: 14978 - RNA, 21 nt, synthetic construct
  source 1..21: mol_type = other RNA
cacccagagacagtgaccaac

SEQ ID NO: 14979 - RNA, 21 nt, synthetic construct
  source 1..21: mol_type = other RNA
cacccagatgagaagccccct

SEQ ID NO: 14980 - RNA, 21 nt, synthetic construct
  source 1..21: mol_type = other RNA
cacccagtgtccacaaggcct

SEQ ID NO: 14981 - RNA, 21 nt, synthetic construct
  source 1..21: mol_type = other RNA
cacccagttgtcatggcgata

SEQ ID NO: 14982 - RNA, 21 nt, synthetic construct
  source 1..21: mol_type = other RNA
caccccaatgctccaggcctc

SEQ ID NO: 14983 - RNA, 21 nt, synthetic construct
  source 1..21: mol_type = other RNA
caccccaattgccttagtggc

SEQ ID NO: 14984 - RNA, 21 nt, synthetic construct
  source 1..21: mol_type = other RNA
caccccacacccagacctgac

SEQ ID NO: 14985 - RNA, 21 nt, synthetic construct
  source 1..21: mol_type = other RNA
caccccacagttggaggagaa

SEQ ID NO: 14986 - RNA, 21 nt, synthetic construct
  source 1..21: mol_type = other RNA
caccccagcagatactctgca

SEQ ID NO: 14987 - RNA, 21 nt, synthetic construct
  source 1..21: mol_type = other RNA
caccccagccctgtctaccag

SEQ ID NO: 14988 - RNA, 21 nt, synthetic construct
  source 1..21: mol_type = other RNA
cacccccctcctcaccacagc

SEQ ID NO: 14989 - RNA, 21 nt, synthetic construct
  source 1..21: mol_type = other RNA
cacccctctgggagtcccgcc

SEQ ID NO: 14990 - RNA, 21 nt, synthetic construct
  source 1..21: mol_type = other RNA
caccctcagacccaggagtcc

SEQ ID NO: 14991 - RNA, 21 nt, synthetic construct
  source 1..21: mol_type = other RNA
caccctgcatagccctgggcc

SEQ ID NO: 14992 - RNA, 21 nt, synthetic construct
  source 1..21: mol_type = other RNA
caccctgcgctaccctctccc

SEQ ID NO: 14993 - RNA, 21 nt, synthetic construct
  source 1..21: mol_type = other RNA
caccctgtgctgggacagact

SEQ ID NO: 14994 - RNA, 21 nt, synthetic construct
  source 1..21: mol_type = other RNA
caccgtgtccctggatctgtt

SEQ ID NO: 14995 - RNA, 21 nt, synthetic construct
  source 1..21: mol_type = other RNA
caccgtttctcattcttccct

SEQ ID NO: 14996 - RNA, 21 nt, synthetic construct
  source 1..21: mol_type = other RNA
cacctacttggcctggacccc

SEQ ID NO: 14997 - RNA, 21 nt, synthetic construct
  source 1..21: mol_type = other RNA
cacctaggacgcaccattctc

SEQ ID NO: 14998 - RNA, 21 nt, synthetic construct
  source 1..21: mol_type = other RNA
cacctctccaaagctgcccat

SEQ ID NO: 14999 - RNA, 21 nt, synthetic construct
  source 1..21: mol_type = other RNA
cacctggggctgtgtttctcg

SEQ ID NO: 15000 - RNA, 21 nt, synthetic construct
  source 1..21: mol_type = other RNA
cacctgtgggtggtgacgggg

SEQ ID NO: 15001 - RNA, 21 nt, synthetic construct
  source 1..21: mol_type = other RNA
cacctgtgtgcctgggcccca

SEQ ID NO: 15002 - RNA, 21 nt, synthetic construct
  source 1..21: mol_type = other RNA
cacctttctagtccccaattt

SEQ ID NO: 15003 - RNA, 21 nt, synthetic construct
  source 1..21: mol_type = other RNA
cacgaaaacagatccagggac

SEQ ID NO: 15004 - RNA, 21 nt, synthetic construct
  source 1..21: mol_type = other RNA
cacgaaaggactcctggctat

SEQ ID NO: 15005 - RNA, 21 nt, synthetic construct
  source 1..21: mol_type = other RNA
cacgacctggtgaacacctag

SEQ ID NO: 15006 - RNA, 21 nt, synthetic construct
  source 1..21: mol_type = other RNA
cacgagaggccaccccagccc

SEQ ID NO: 15007 - RNA, 21 nt, synthetic construct
  source 1..21: mol_type = other RNA
cacgagtccaggccccagccc

SEQ ID NO: 15008 - RNA, 21 nt, synthetic construct
  source 1..21: mol_type = other RNA
cacggacacccccctcctcac

SEQ ID NO: 15009 - RNA, 21 nt, synthetic construct
  source 1..21: mol_type = other RNA
cacggaggaacaatataaatt

SEQ ID NO: 15010 - RNA, 21 nt, synthetic construct
  source 1..21: mol_type = other RNA
cacggcaaaacccccgtcacc

SEQ ID NO: 15011 - RNA, 21 nt, synthetic construct
  source 1..21: mol_type = other RNA
cacggcttcgttcctgcagag

SEQ ID NO: 15012 - RNA, 21 nt, synthetic construct
  source 1..21: mol_type = other RNA
cacgggataaattacccccca

SEQ ID NO: 15013 - RNA, 21 nt, synthetic construct
  source 1..21: mol_type = other RNA
cacgggccaccgtttctcatt

SEQ ID NO: 15014 - RNA, 21 nt, synthetic construct
  source 1..21: mol_type = other RNA
cacggggccctgcagccaggg

SEQ ID NO: 15015 - RNA, 21 nt, synthetic construct
  source 1..21: mol_type = other RNA
cacggtgctaggacagtgggg

SEQ ID NO: 15016 - RNA, 21 nt, synthetic construct
  source 1..21: mol_type = other RNA
cacggtgtcccagcaagtcgg

SEQ ID NO: 15017 - RNA, 21 nt, synthetic construct
  source 1..21: mol_type = other RNA
cacgtaacctgagaagggaat

SEQ ID NO: 15018 - RNA, 21 nt, synthetic construct
  source 1..21: mol_type = other RNA
cacgtgccctgggaacgggat

SEQ ID NO: 15019 - RNA, 21 nt, synthetic construct
  source 1..21: mol_type = other RNA
cacgtgcggccccttcacagc

SEQ ID NO: 15020 - RNA, 21 nt, synthetic construct
  source 1..21: mol_type = other RNA
cacgtggggtaccctaagaac

SEQ ID NO: 15021 - RNA, 21 nt, synthetic construct
  source 1..21: mol_type = other RNA
cacgtgggtttatcaaccact

SEQ ID NO: 15022 - RNA, 21 nt, synthetic construct
  source 1..21: mol_type = other RNA
cactaaggcaattggggtgca

SEQ ID NO: 15023 - RNA, 21 nt, synthetic construct
  source 1..21: mol_type = other RNA
cactccagttcactgaggccc

SEQ ID NO: 15024 - RNA, 21 nt, synthetic construct
  source 1..21: mol_type = other RNA
cactccttcctcagctccagt

SEQ ID NO: 15025 - RNA, 21 nt, synthetic construct
  source 1..21: mol_type = other RNA
cactcttcggggtatcccagg

SEQ ID NO: 15026 - RNA, 21 nt, synthetic construct
  source 1..21: mol_type = other RNA
cactgaaaccctcagtcctag

SEQ ID NO: 15027 - RNA, 21 nt, synthetic construct
  source 1..21: mol_type = other RNA
cactgaaggcctggccggcct

SEQ ID NO: 15028 - RNA, 21 nt, synthetic construct
  source 1..21: mol_type = other RNA
cactgagaaccgggcaggtca

SEQ ID NO: 15029 - RNA, 21 nt, synthetic construct
  source 1..21: mol_type = other RNA
cactgagcactgaaggcctgg

SEQ ID NO: 15030 - RNA, 21 nt, synthetic construct
  source 1..21: mol_type = other RNA
cactgaggccccctctgcacg

SEQ ID NO: 15031 - RNA, 21 nt, synthetic construct
  source 1..21: mol_type = other RNA
cactgatcctggtgctgcagc

SEQ ID NO: 15032 - RNA, 21 nt, synthetic construct
  source 1..21: mol_type = other RNA
cactggaagcgccacctgtgg

SEQ ID NO: 15033 - RNA, 21 nt, synthetic construct
  source 1..21: mol_type = other RNA
cactggctgtttaagatacgc

SEQ ID NO: 15034 - RNA, 21 nt, synthetic construct
  source 1..21: mol_type = other RNA
cactgggcaaccaggcgtatc

SEQ ID NO: 15035 - RNA, 21 nt, synthetic construct
  source 1..21: mol_type = other RNA
cactggggactctttaaggaa

SEQ ID NO: 15036 - RNA, 21 nt, synthetic construct
  source 1..21: mol_type = other RNA
cactgggtgggctccgggacc

SEQ ID NO: 15037 - RNA, 21 nt, synthetic construct
  source 1..21: mol_type = other RNA
cactgtcctagcaccgtgtcc

SEQ ID NO: 15038 - RNA, 21 nt, synthetic construct
  source 1..21: mol_type = other RNA
cactgtctctgggtgactctt

SEQ ID NO: 15039 - RNA, 21 nt, synthetic construct
  source 1..21: mol_type = other RNA
cacttcccaagaggagaagca

SEQ ID NO: 15040 - RNA, 21 nt, synthetic construct
  source 1..21: mol_type = other RNA
cacttcctgtttgcagatagc

SEQ ID NO: 15041 - RNA, 21 nt, synthetic construct
  source 1..21: mol_type = other RNA
cacttggtgaggctggtaccc

SEQ ID NO: 15042 - RNA, 21 nt, synthetic construct
  source 1..21: mol_type = other RNA
cagaacctgagctgctctgac

SEQ ID NO: 15043 - RNA, 21 nt, synthetic construct
  source 1..21: mol_type = other RNA
cagaagcccagagcagggcct

SEQ ID NO: 15044 - RNA, 21 nt, synthetic construct
  source 1..21: mol_type = other RNA
cagaataagttggtcctgagt

SEQ ID NO: 15045 - RNA, 21 nt, synthetic construct
  source 1..21: mol_type = other RNA
cagacccacgagtccaggccc

SEQ ID NO: 15046 - RNA, 21 nt, synthetic construct
  source 1..21: mol_type = other RNA
cagacccaggggtccaggccc

SEQ ID NO: 15047 - RNA, 21 nt, synthetic construct
  source 1..21: mol_type = other RNA
cagacctgacccaaacccagc

SEQ ID NO: 15048 - RNA, 21 nt, synthetic construct
  source 1..21: mol_type = other RNA
cagacggccgcgtcagagcag

SEQ ID NO: 15049 - RNA, 21 nt, synthetic construct
  source 1..21: mol_type = other RNA
cagactagggaagaggttcca

SEQ ID NO: 15050 - RNA, 21 nt, synthetic construct
  source 1..21: mol_type = other RNA
cagactcaggggcctgggcgg

SEQ ID NO: 15051 - RNA, 21 nt, synthetic construct
  source 1..21: mol_type = other RNA
cagactgagccccgttcccct

SEQ ID NO: 15052 - RNA, 21 nt, synthetic construct
  source 1..21: mol_type = other RNA
cagagaagagctgggggcctg

SEQ ID NO: 15053 - RNA, 21 nt, synthetic construct
  source 1..21: mol_type = other RNA
cagagacagtgaccaaccatc

SEQ ID NO: 15054 - RNA, 21 nt, synthetic construct
  source 1..21: mol_type = other RNA
cagagaggagggattcccttc

SEQ ID NO: 15055 - RNA, 21 nt, synthetic construct
  source 1..21: mol_type = other RNA
cagagcagctcaggttctggg

SEQ ID NO: 15056 - RNA, 21 nt, synthetic construct
  source 1..21: mol_type = other RNA
cagagcagggccttagggaag

SEQ ID NO: 15057 - RNA, 21 nt, synthetic construct
  source 1..21: mol_type = other RNA
cagagcagggtcccgcttccc

SEQ ID NO: 15058 - RNA, 21 nt, synthetic construct
  source 1..21: mol_type = other RNA
cagagccaggaacccctgtag

SEQ ID NO: 15059 - RNA, 21 nt, synthetic construct
  source 1..21: mol_type = other RNA
cagagccaggagtcctggccc

SEQ ID NO: 15060 - RNA, 21 nt, synthetic construct
  source 1..21: mol_type = other RNA
cagaggccccaggccacctac

SEQ ID NO: 15061 - RNA, 21 nt, synthetic construct
  source 1..21: mol_type = other RNA
cagaggctgttgggtcatttt

SEQ ID NO: 15062 - RNA, 21 nt, synthetic construct
  source 1..21: mol_type = other RNA
cagagggagccacgaaaacag

SEQ ID NO: 15063 - RNA, 21 nt, synthetic construct
  source 1..21: mol_type = other RNA
cagagggggcctcagtgaact

SEQ ID NO: 15064 - RNA, 21 nt, synthetic construct
  source 1..21: mol_type = other RNA
cagaggggtgagacagctgca

SEQ ID NO: 15065 - RNA, 21 nt, synthetic construct
  source 1..21: mol_type = other RNA
cagagtatctgctggggtggt

SEQ ID NO: 15066 - RNA, 21 nt, synthetic construct
  source 1..21: mol_type = other RNA
cagagtccaggcccaacccct

SEQ ID NO: 15067 - RNA, 21 nt, synthetic construct
  source 1..21: mol_type = other RNA
cagatactctgcaggaacgaa

SEQ ID NO: 15068 - RNA, 21 nt, synthetic construct
  source 1..21: mol_type = other RNA
cagatagcactggggactctt

SEQ ID NO: 15069 - RNA, 21 nt, synthetic construct
  source 1..21: mol_type = other RNA
cagatagccaggagtcctttc

SEQ ID NO: 15070 - RNA, 21 nt, synthetic construct
  source 1..21: mol_type = other RNA
cagatccagggacacggtgct

SEQ ID NO: 15071 - RNA, 21 nt, synthetic construct
  source 1..21: mol_type = other RNA
cagatgaaggagtccaggccc

SEQ ID NO: 15072 - RNA, 21 nt, synthetic construct
  source 1..21: mol_type = other RNA
cagatgagaagccccctccct

SEQ ID NO: 15073 - RNA, 21 nt, synthetic construct
  source 1..21: mol_type = other RNA
cagatgggcagctttggagag

SEQ ID NO: 15074 - RNA, 21 nt, synthetic construct
  source 1..21: mol_type = other RNA
cagcaagtcgggactccagag

SEQ ID NO: 15075 - RNA, 21 nt, synthetic construct
  source 1..21: mol_type = other RNA
cagcacagggtggccttcctc

SEQ ID NO: 15076 - RNA, 21 nt, synthetic construct
  source 1..21: mol_type = other RNA
cagcaccaggatcagtgaaac

SEQ ID NO: 15077 - RNA, 21 nt, synthetic construct
  source 1..21: mol_type = other RNA
cagcagatactctgcaggaac

SEQ ID NO: 15078 - RNA, 21 nt, synthetic construct
  source 1..21: mol_type = other RNA
cagcaggggggcgatgcttgg

SEQ ID NO: 15079 - RNA, 21 nt, synthetic construct
  source 1..21: mol_type = other RNA
cagcataagctggtcacccca

SEQ ID NO: 15080 - RNA, 21 nt, synthetic construct
  source 1..21: mol_type = other RNA
cagccacagcaggggggcgat

SEQ ID NO: 15081 - RNA, 21 nt, synthetic construct
  source 1..21: mol_type = other RNA
cagccacggtgtcccagcaag

SEQ ID NO: 15082 - RNA, 21 nt, synthetic construct
  source 1..21: mol_type = other RNA
cagccaggggctgacacgggc

SEQ ID NO: 15083 - RNA, 21 nt, synthetic construct
  source 1..21: mol_type = other RNA
cagccaggtccttccaagggt

SEQ ID NO: 15084 - RNA, 21 nt, synthetic construct
  source 1..21: mol_type = other RNA
cagccagtggccagaggctgt

SEQ ID NO: 15085 - RNA, 21 nt, synthetic construct
  source 1..21: mol_type = other RNA
cagcccaccccaatgctccag

SEQ ID NO: 15086 - RNA, 21 nt, synthetic construct
  source 1..21: mol_type = other RNA
cagccccaggtggagaaactg

SEQ ID NO: 15087 - RNA, 21 nt, synthetic construct
  source 1..21: mol_type = other RNA
cagccccgcctccctaagacc

SEQ ID NO: 15088 - RNA, 21 nt, synthetic construct
  source 1..21: mol_type = other RNA
cagccccgtcctggcagggct

SEQ ID NO: 15089 - RNA, 21 nt, synthetic construct
  source 1..21: mol_type = other RNA
cagcccctcctactctagccc

SEQ ID NO: 15090 - RNA, 21 nt, synthetic construct
  source 1..21: mol_type = other RNA
cagcccctcctccctcagacc

SEQ ID NO: 15091 - RNA, 21 nt, synthetic construct
  source 1..21: mol_type = other RNA
cagcccctcctccttcagagc

SEQ ID NO: 15092 - RNA, 21 nt, synthetic construct
  source 1..21: mol_type = other RNA
cagcccctcctctctcaaacc

SEQ ID NO: 15093 - RNA, 21 nt, synthetic construct
  source 1..21: mol_type = other RNA
cagcccctcctgccttaaacc

SEQ ID NO: 15094 - RNA, 21 nt, synthetic construct
  source 1..21: mol_type = other RNA
cagcccctggctgcagggccc

SEQ ID NO: 15095 - RNA, 21 nt, synthetic construct
  source 1..21: mol_type = other RNA
cagcccgagtttccatgacct

SEQ ID NO: 15096 - RNA, 21 nt, synthetic construct
  source 1..21: mol_type = other RNA
cagccctaagaatcctggctc

SEQ ID NO: 15097 - RNA, 21 nt, synthetic construct
  source 1..21: mol_type = other RNA
cagccctgccaggacggggct

SEQ ID NO: 15098 - RNA, 21 nt, synthetic construct
  source 1..21: mol_type = other RNA
cagccctgtctaccaggctgc

SEQ ID NO: 15099 - RNA, 21 nt, synthetic construct
  source 1..21: mol_type = other RNA
cagcccttccgccctcagatg

SEQ ID NO: 15100 - RNA, 21 nt, synthetic construct
  source 1..21: mol_type = other RNA
cagcctagttttagcactgaa

SEQ ID NO: 15101 - RNA, 21 nt, synthetic construct
  source 1..21: mol_type = other RNA
cagcctcaccaagtggttgat

SEQ ID NO: 15102 - RNA, 21 nt, synthetic construct
  source 1..21: mol_type = other RNA
cagcctctccccattcagacc

SEQ ID NO: 15103 - RNA, 21 nt, synthetic construct
  source 1..21: mol_type = other RNA
cagcctctggccactggctgt

SEQ ID NO: 15104 - RNA, 21 nt, synthetic construct
  source 1..21: mol_type = other RNA
cagcctggggcccaggcacac

SEQ ID NO: 15105 - RNA, 21 nt, synthetic construct
  source 1..21: mol_type = other RNA
cagcctggtagacagggctgg

SEQ ID NO: 15106 - RNA, 21 nt, synthetic construct
  source 1..21: mol_type = other RNA
cagctcaggttctgggagagg

SEQ ID NO: 15107 - RNA, 21 nt, synthetic construct
  source 1..21: mol_type = other RNA
cagctccagttcaggtcccgg

SEQ ID NO: 15108 - RNA, 21 nt, synthetic construct
  source 1..21: mol_type = other RNA
cagctcccctgcttcttggcc

SEQ ID NO: 15109 - RNA, 21 nt, synthetic construct
  source 1..21: mol_type = other RNA
cagctcttctctgttcagccc

SEQ ID NO: 15110 - RNA, 21 nt, synthetic construct
  source 1..21: mol_type = other RNA
cagctgcacacctgtgtgcct

SEQ ID NO: 15111 - RNA, 21 nt, synthetic construct
  source 1..21: mol_type = other RNA
cagctgtctcacccctctggg

SEQ ID NO: 15112 - RNA, 21 nt, synthetic construct
  source 1..21: mol_type = other RNA
cagcttatgctgtttgcccag

SEQ ID NO: 15113 - RNA, 21 nt, synthetic construct
  source 1..21: mol_type = other RNA
cagcttccttacacttcccaa

SEQ ID NO: 15114 - RNA, 21 nt, synthetic construct
  source 1..21: mol_type = other RNA
cagctttggagaggtgaggga

SEQ ID NO: 15115 - RNA, 21 nt, synthetic construct
  source 1..21: mol_type = other RNA
caggaacccctgtagggaagg

SEQ ID NO: 15116 - RNA, 21 nt, synthetic construct
  source 1..21: mol_type = other RNA
caggaacgaagccgtgggccc

SEQ ID NO: 15117 - RNA, 21 nt, synthetic construct
  source 1..21: mol_type = other RNA
caggaagtgaacggggaaggg

SEQ ID NO: 15118 - RNA, 21 nt, synthetic construct
  source 1..21: mol_type = other RNA
caggaatgggggcagggtacc

SEQ ID NO: 15119 - RNA, 21 nt, synthetic construct
  source 1..21: mol_type = other RNA
caggacagcctagttttagca

SEQ ID NO: 15120 - RNA, 21 nt, synthetic construct
  source 1..21: mol_type = other RNA
caggaccaacttattctgatt

SEQ ID NO: 15121 - RNA, 21 nt, synthetic construct
  source 1..21: mol_type = other RNA
caggacgagaaacacagcccc

SEQ ID NO: 15122 - RNA, 21 nt, synthetic construct
  source 1..21: mol_type = other RNA
caggacggggctggctactgg

SEQ ID NO: 15123 - RNA, 21 nt, synthetic construct
  source 1..21: mol_type = other RNA
caggactcctggctctgaagg

SEQ ID NO: 15124 - RNA, 21 nt, synthetic construct
  source 1..21: mol_type = other RNA
caggagagccaggggcatgag

SEQ ID NO: 15125 - RNA, 21 nt, synthetic construct
  source 1..21: mol_type = other RNA
caggagaggcgctcaggcttc

SEQ ID NO: 15126 - RNA, 21 nt, synthetic construct
  source 1..21: mol_type = other RNA
caggagcccaggcccccagct

SEQ ID NO: 15127 - RNA, 21 nt, synthetic construct
  source 1..21: mol_type = other RNA
caggaggccaggccccagccc

SEQ ID NO: 15128 - RNA, 21 nt, synthetic construct
  source 1..21: mol_type = other RNA
caggaggcctggagcattggg

SEQ ID NO: 15129 - RNA, 21 nt, synthetic construct
  source 1..21: mol_type = other RNA
caggaggggctgggggccagg

SEQ ID NO: 15130 - RNA, 21 nt, synthetic construct
  source 1..21: mol_type = other RNA
caggagtccaggcccccagtc

SEQ ID NO: 15131 - RNA, 21 nt, synthetic construct
  source 1..21: mol_type = other RNA
caggagtcctggcccccagcc

SEQ ID NO: 15132 - RNA, 21 nt, synthetic construct
  source 1..21: mol_type = other RNA
caggagtcctttcgtggtttc

SEQ ID NO: 15133 - RNA, 21 nt, synthetic construct
  source 1..21: mol_type = other RNA
caggatcagtgaaacgcacca

SEQ ID NO: 15134 - RNA, 21 nt, synthetic construct
  source 1..21: mol_type = other RNA
caggattcttagggctgaaca

SEQ ID NO: 15135 - RNA, 21 nt, synthetic construct
  source 1..21: mol_type = other RNA
caggcacacaggtgtgcagct

SEQ ID NO: 15136 - RNA, 21 nt, synthetic construct
  source 1..21: mol_type = other RNA
caggcaggtccccaagcatcg

SEQ ID NO: 15137 - RNA, 21 nt, synthetic construct
  source 1..21: mol_type = other RNA
caggcatccctgtgaaagatg

SEQ ID NO: 15138 - RNA, 21 nt, synthetic construct
  source 1..21: mol_type = other RNA
caggcatctttcacagggatg

SEQ ID NO: 15139 - RNA, 21 nt, synthetic construct
  source 1..21: mol_type = other RNA
caggccaagtaggtggcctgg

SEQ ID NO: 15140 - RNA, 21 nt, synthetic construct
  source 1..21: mol_type = other RNA
caggccacctacttggcctgg

SEQ ID NO: 15141 - RNA, 21 nt, synthetic construct
  source 1..21: mol_type = other RNA
caggcccaacccctccccatt

SEQ ID NO: 15142 - RNA, 21 nt, synthetic construct
  source 1..21: mol_type = other RNA
caggcccagccccgcctccct

SEQ ID NO: 15143 - RNA, 21 nt, synthetic construct
  source 1..21: mol_type = other RNA
caggccccagcccctcctctc

SEQ ID NO: 15144 - RNA, 21 nt, synthetic construct
  source 1..21: mol_type = other RNA
caggccccagcccttccgccc

SEQ ID NO: 15145 - RNA, 21 nt, synthetic construct
  source 1..21: mol_type = other RNA
caggcccccagcctctcccca

SEQ ID NO: 15146 - RNA, 21 nt, synthetic construct
  source 1..21: mol_type = other RNA
caggcccccagctcttctctg

SEQ ID NO: 15147 - RNA, 21 nt, synthetic construct
  source 1..21: mol_type = other RNA
caggcccccagtccctccacc

SEQ ID NO: 15148 - RNA, 21 nt, synthetic construct
  source 1..21: mol_type = other RNA
caggcccctgagtctgtccca

SEQ ID NO: 15149 - RNA, 21 nt, synthetic construct
  source 1..21: mol_type = other RNA
caggccggccaggccttcagt

SEQ ID NO: 15150 - RNA, 21 nt, synthetic construct
  source 1..21: mol_type = other RNA
caggcctcaggcatctttcac

SEQ ID NO: 15151 - RNA, 21 nt, synthetic construct
  source 1..21: mol_type = other RNA
caggcctcctgggataccccg

SEQ ID NO: 15152 - RNA, 21 nt, synthetic construct
  source 1..21: mol_type = other RNA
caggccttcagtgctcagtgg

SEQ ID NO: 15153 - RNA, 21 nt, synthetic construct
  source 1..21: mol_type = other RNA
caggccttgtggacactgggt

SEQ ID NO: 15154 - RNA, 21 nt, synthetic construct
  source 1..21: mol_type = other RNA
caggcgtatcttaaacagcca

SEQ ID NO: 15155 - RNA, 21 nt, synthetic construct
  source 1..21: mol_type = other RNA
caggctgccttttgggtggat

SEQ ID NO: 15156 - RNA, 21 nt, synthetic construct
  source 1..21: mol_type = other RNA
caggctgtcacactccagttc

SEQ ID NO: 15157 - RNA, 21 nt, synthetic construct
  source 1..21: mol_type = other RNA
caggcttccctgtcccccttc

SEQ ID NO: 15158 - RNA, 21 nt, synthetic construct
  source 1..21: mol_type = other RNA
cagggaagcctgagcgcctct

SEQ ID NO: 15159 - RNA, 21 nt, synthetic construct
  source 1..21: mol_type = other RNA
cagggacacggtgctaggaca

SEQ ID NO: 15160 - RNA, 21 nt, synthetic construct
  source 1..21: mol_type = other RNA
cagggactccagagtccaggc

SEQ ID NO: 15161 - RNA, 21 nt, synthetic construct
  source 1..21: mol_type = other RNA
cagggatgcctgtactgggca

SEQ ID NO: 15162 - RNA, 21 nt, synthetic construct
  source 1..21: mol_type = other RNA
cagggatggttggtcactgtc

SEQ ID NO: 15163 - RNA, 21 nt, synthetic construct
  source 1..21: mol_type = other RNA
cagggcacgtgcggccccttc

SEQ ID NO: 15164 - RNA, 21 nt, synthetic construct
  source 1..21: mol_type = other RNA
cagggccccgtgcagaggggg

SEQ ID NO: 15165 - RNA, 21 nt, synthetic construct
  source 1..21: mol_type = other RNA
cagggccttagggaagcggga

SEQ ID NO: 15166 - RNA, 21 nt, synthetic construct
  source 1..21: mol_type = other RNA
cagggctatgcagggtggagg

SEQ ID NO: 15167 - RNA, 21 nt, synthetic construct
  source 1..21: mol_type = other RNA
cagggctggggtggcctctcg

SEQ ID NO: 15168 - RNA, 21 nt, synthetic construct
  source 1..21: mol_type = other RNA
cagggctgtggtgaggagggg

SEQ ID NO: 15169 - RNA, 21 nt, synthetic construct
  source 1..21: mol_type = other RNA
caggggaacggggatgcaggg

SEQ ID NO: 15170 - RNA, 21 nt, synthetic construct
  source 1..21: mol_type = other RNA
caggggaacggggctcagtct

SEQ ID NO: 15171 - RNA, 21 nt, synthetic construct
  source 1..21: mol_type = other RNA
caggggaagggggatgcaggg

SEQ ID NO: 15172 - RNA, 21 nt, synthetic construct
  source 1..21: mol_type = other RNA
caggggagctgggtttgggtc

SEQ ID NO: 15173 - RNA, 21 nt, synthetic construct
  source 1..21: mol_type = other RNA
caggggcatgagatggtggac

SEQ ID NO: 15174 - RNA, 21 nt, synthetic construct
  source 1..21: mol_type = other RNA
caggggcctgggcgggactcc

SEQ ID NO: 15175 - RNA, 21 nt, synthetic construct
  source 1..21: mol_type = other RNA
caggggctgacacgggccacc

SEQ ID NO: 15176 - RNA, 21 nt, synthetic construct
  source 1..21: mol_type = other RNA
caggggggcgatgcttgggga

SEQ ID NO: 15177 - RNA, 21 nt, synthetic construct
  source 1..21: mol_type = other RNA
cagggggtcggaggagggact

SEQ ID NO: 15178 - RNA, 21 nt, synthetic construct
  source 1..21: mol_type = other RNA
caggggtccaggcccagcccc

SEQ ID NO: 15179 - RNA, 21 nt, synthetic construct
  source 1..21: mol_type = other RNA
caggggttcctggctctgctc

SEQ ID NO: 15180 - RNA, 21 nt, synthetic construct
  source 1..21: mol_type = other RNA
cagggtaccagcctcaccaag

SEQ ID NO: 15181 - RNA, 21 nt, synthetic construct
  source 1..21: mol_type = other RNA
cagggtcccgcttccctaagg

SEQ ID NO: 15182 - RNA, 21 nt, synthetic construct
  source 1..21: mol_type = other RNA
cagggtggaggaaggccaccc

SEQ ID NO: 15183 - RNA, 21 nt, synthetic construct
  source 1..21: mol_type = other RNA
cagggtggccactgagaaccg

SEQ ID NO: 15184 - RNA, 21 nt, synthetic construct
  source 1..21: mol_type = other RNA
cagggtggccttcctccaccc

SEQ ID NO: 15185 - RNA, 21 nt, synthetic construct
  source 1..21: mol_type = other RNA
caggtaaaactgacgcacgga

SEQ ID NO: 15186 - RNA, 21 nt, synthetic construct
  source 1..21: mol_type = other RNA
caggtaccatgtggggttccc

SEQ ID NO: 15187 - RNA, 21 nt, synthetic construct
  source 1..21: mol_type = other RNA
caggtccccaagcatcgcccc

SEQ ID NO: 15188 - RNA, 21 nt, synthetic construct
  source 1..21: mol_type = other RNA
caggtcccggagcccacccag

SEQ ID NO: 15189 - RNA, 21 nt, synthetic construct
  source 1..21: mol_type = other RNA
caggtccttccaagggtcaag

SEQ ID NO: 15190 - RNA, 21 nt, synthetic construct
  source 1..21: mol_type = other RNA
caggtccttgaaagggaaagg

SEQ ID NO: 15191 - RNA, 21 nt, synthetic construct
  source 1..21: mol_type = other RNA
caggtcgtggccgcctctact

SEQ ID NO: 15192 - RNA, 21 nt, synthetic construct
  source 1..21: mol_type = other RNA
caggtctgggtgtggggtgac

SEQ ID NO: 15193 - RNA, 21 nt, synthetic construct
  source 1..21: mol_type = other RNA
caggtggagaaactggccggg

SEQ ID NO: 15194 - RNA, 21 nt, synthetic construct
  source 1..21: mol_type = other RNA
caggtggcgcttccagtgctc

SEQ ID NO: 15195 - RNA, 21 nt, synthetic construct
  source 1..21: mol_type = other RNA
caggtgtgcagctgtctcacc

SEQ ID NO: 15196 - RNA, 21 nt, synthetic construct
  source 1..21: mol_type = other RNA
caggttacgtggccaagaagc

SEQ ID NO: 15197 - RNA, 21 nt, synthetic construct
  source 1..21: mol_type = other RNA
caggttctgggagagggtagc

SEQ ID NO: 15198 - RNA, 21 nt, synthetic construct
  source 1..21: mol_type = other RNA
cagtacaggcatccctgtgaa

SEQ ID NO: 15199 - RNA, 21 nt, synthetic construct
  source 1..21: mol_type = other RNA
cagtagccagccccgtcctgg

SEQ ID NO: 15200 - RNA, 21 nt, synthetic construct
  source 1..21: mol_type = other RNA
cagtcaccccacagttggagg

SEQ ID NO: 15201 - RNA, 21 nt, synthetic construct
  source 1..21: mol_type = other RNA
cagtccctccaccctcagacc

SEQ ID NO: 15202 - RNA, 21 nt, synthetic construct
  source 1..21: mol_type = other RNA
cagtcctaggaaaacagggat

SEQ ID NO: 15203 - RNA, 21 nt, synthetic construct
  source 1..21: mol_type = other RNA
cagtctgaagagcagagccag

SEQ ID NO: 15204 - RNA, 21 nt, synthetic construct
  source 1..21: mol_type = other RNA
cagtgaaacgcaccagacggc

SEQ ID NO: 15205 - RNA, 21 nt, synthetic construct
  source 1..21: mol_type = other RNA
cagtgaactggagtgtgacag

SEQ ID NO: 15206 - RNA, 21 nt, synthetic construct
  source 1..21: mol_type = other RNA
cagtgaccaaccatccctgtt

SEQ ID NO: 15207 - RNA, 21 nt, synthetic construct
  source 1..21: mol_type = other RNA
cagtgctaaaactaggctgtc

SEQ ID NO: 15208 - RNA, 21 nt, synthetic construct
  source 1..21: mol_type = other RNA
cagtgctatctgggacatatt

SEQ ID NO: 15209 - RNA, 21 nt, synthetic construct
  source 1..21: mol_type = other RNA
cagtgctcagactagggaaga

SEQ ID NO: 15210 - RNA, 21 nt, synthetic construct
  source 1..21: mol_type = other RNA
cagtgctcagtggaaaccacg

SEQ ID NO: 15211 - RNA, 21 nt, synthetic construct
  source 1..21: mol_type = other RNA
cagtggaaaccacgaaaggac

SEQ ID NO: 15212 - RNA, 21 nt, synthetic construct
  source 1..21: mol_type = other RNA
cagtggccaccctgcgctacc

SEQ ID NO: 15213 - RNA, 21 nt, synthetic construct
  source 1..21: mol_type = other RNA
cagtggccagaggctgttggg

SEQ ID NO: 15214 - RNA, 21 nt, synthetic construct
  source 1..21: mol_type = other RNA
cagtggggaaaatgacccaac

SEQ ID NO: 15215 - RNA, 21 nt, synthetic construct
  source 1..21: mol_type = other RNA
cagtggtcaggccggccaggc

SEQ ID NO: 15216 - RNA, 21 nt, synthetic construct
  source 1..21: mol_type = other RNA
cagtgtccacaaggcctgggg

SEQ ID NO: 15217 - RNA, 21 nt, synthetic construct
  source 1..21: mol_type = other RNA
cagttcactgaggccccctct

SEQ ID NO: 15218 - RNA, 21 nt, synthetic construct
  source 1..21: mol_type = other RNA
cagttcaggtcccggagccca

SEQ ID NO: 15219 - RNA, 21 nt, synthetic construct
  source 1..21: mol_type = other RNA
cagttggaggagaatccaccc

SEQ ID NO: 15220 - RNA, 21 nt, synthetic construct
  source 1..21: mol_type = other RNA
cagttgtcatggcgatagggg

SEQ ID NO: 15221 - RNA, 21 nt, synthetic construct
  source 1..21: mol_type = other RNA
cagtttctccacctggggctg

SEQ ID NO: 15222 - RNA, 21 nt, synthetic construct
  source 1..21: mol_type = other RNA
cagtttggaaaaacaaaatca

SEQ ID NO: 15223 - RNA, 21 nt, synthetic construct
  source 1..21: mol_type = other RNA
cagttttacctgtgagataag

SEQ ID NO: 15224 - RNA, 21 nt, synthetic construct
  source 1..21: mol_type = other RNA
cataagctggtcaccccacac

SEQ ID NO: 15225 - RNA, 21 nt, synthetic construct
  source 1..21: mol_type = other RNA
catagccctgggcccacggct

SEQ ID NO: 15226 - RNA, 21 nt, synthetic construct
  source 1..21: mol_type = other RNA
catattcctccgcccagagca

SEQ ID NO: 15227 - RNA, 21 nt, synthetic construct
  source 1..21: mol_type = other RNA
catcccccagaggccccaggc

SEQ ID NO: 15228 - RNA, 21 nt, synthetic construct
  source 1..21: mol_type = other RNA
catcccccttcccctgcatcc

SEQ ID NO: 15229 - RNA, 21 nt, synthetic construct
  source 1..21: mol_type = other RNA
catccccgttcccctgcatcc

SEQ ID NO: 15230 - RNA, 21 nt, synthetic construct
  source 1..21: mol_type = other RNA
catcccgttcccagggcacgt

SEQ ID NO: 15231 - RNA, 21 nt, synthetic construct
  source 1..21: mol_type = other RNA
catccctgtgaaagatgcctg

SEQ ID NO: 15232 - RNA, 21 nt, synthetic construct
  source 1..21: mol_type = other RNA
catccctgttttcctaggact

SEQ ID NO: 15233 - RNA, 21 nt, synthetic construct
  source 1..21: mol_type = other RNA
catccttctccaggcaggtcc

SEQ ID NO: 15234 - RNA, 21 nt, synthetic construct
  source 1..21: mol_type = other RNA
catccttctttccttaaagag

SEQ ID NO: 15235 - RNA, 21 nt, synthetic construct
  source 1..21: mol_type = other RNA
catcgcccccctgctgtggct

SEQ ID NO: 15236 - RNA, 21 nt, synthetic construct
  source 1..21: mol_type = other RNA
catctcatgcccctggctctc

SEQ ID NO: 15237 - RNA, 21 nt, synthetic construct
  source 1..21: mol_type = other RNA
catctgagggcggaagggctg

SEQ ID NO: 15238 - RNA, 21 nt, synthetic construct
  source 1..21: mol_type = other RNA
catctggaggaggcgggaggg

SEQ ID NO: 15239 - RNA, 21 nt, synthetic construct
  source 1..21: mol_type = other RNA
catctgggtgcgggaacccca

SEQ ID NO: 15240 - RNA, 21 nt, synthetic construct
  source 1..21: mol_type = other RNA
catctttcacagggatgcctg

SEQ ID NO: 15241 - RNA, 21 nt, synthetic construct
  source 1..21: mol_type = other RNA
catgacaactgggtggaaata

SEQ ID NO: 15242 - RNA, 21 nt, synthetic construct
  source 1..21: mol_type = other RNA
catgacctcatgctcttggcc

SEQ ID NO: 15243 - RNA, 21 nt, synthetic construct
  source 1..21: mol_type = other RNA
catgagatggtggacgaggaa

SEQ ID NO: 15244 - RNA, 21 nt, synthetic construct
  source 1..21: mol_type = other RNA
catgaggtcatggaaactcgg

SEQ ID NO: 15245 - RNA, 21 nt, synthetic construct
  source 1..21: mol_type = other RNA
catgcccctggctctcctgcc

SEQ ID NO: 15246 - RNA, 21 nt, synthetic construct
  source 1..21: mol_type = other RNA
catgctcttggccctcgtagc

SEQ ID NO: 15247 - RNA, 21 nt, synthetic construct
  source 1..21: mol_type = other RNA
catggaaactcgggctgtgaa

SEQ ID NO: 15248 - RNA, 21 nt, synthetic construct
  source 1..21: mol_type = other RNA
catggcgataggggagggggg

SEQ ID NO: 15249 - RNA, 21 nt, synthetic construct
  source 1..21: mol_type = other RNA
catggtacctgttagacacgg

SEQ ID NO: 15250 - RNA, 21 nt, synthetic construct
  source 1..21: mol_type = other RNA
catgtggggttcccgcaccca

SEQ ID NO: 15251 - RNA, 21 nt, synthetic construct
  source 1..21: mol_type = other RNA
cattcaacccaggaggccagg

SEQ ID NO: 15252 - RNA, 21 nt, synthetic construct
  source 1..21: mol_type = other RNA
cattcagacccaggggtccag

SEQ ID NO: 15253 - RNA, 21 nt, synthetic construct
  source 1..21: mol_type = other RNA
cattcctgcaccccaattgcc

SEQ ID NO: 15254 - RNA, 21 nt, synthetic construct
  source 1..21: mol_type = other RNA
cattctcacaaagggagtttt

SEQ ID NO: 15255 - RNA, 21 nt, synthetic construct
  source 1..21: mol_type = other RNA
cattcttcccttaggggtcca

SEQ ID NO: 15256 - RNA, 21 nt, synthetic construct
  source 1..21: mol_type = other RNA
cattgctctccttgcccccct

SEQ ID NO: 15257 - RNA, 21 nt, synthetic construct
  source 1..21: mol_type = other RNA
cattggggtgggctggggttc

SEQ ID NO: 15258 - RNA, 21 nt, synthetic construct
  source 1..21: mol_type = other RNA
cattttccccactgtcctagc

SEQ ID NO: 15259 - RNA, 21 nt, synthetic construct
  source 1..21: mol_type = other RNA
ccaaaacttggggggacaaaa

SEQ ID NO: 15260 - RNA, 21 nt, synthetic construct
  source 1..21: mol_type = other RNA
ccaaaaggcagcctggtagac

SEQ ID NO: 15261 - RNA, 21 nt, synthetic construct
  source 1..21: mol_type = other RNA
ccaaacccagctcccctgctt

SEQ ID NO: 15262 - RNA, 21 nt, synthetic construct
  source 1..21: mol_type = other RNA
ccaaactgcttctcctcttgg

SEQ ID NO: 15263 - RNA, 21 nt, synthetic construct
  source 1..21: mol_type = other RNA
ccaaagctgcccatctggagg

SEQ ID NO: 15264 - RNA, 21 nt, synthetic construct
  source 1..21: mol_type = other RNA
ccaaagttagaactcaggacc

SEQ ID NO: 15265 - RNA, 21 nt, synthetic construct
  source 1..21: mol_type = other RNA
ccaacagcctctggccactgg

SEQ ID NO: 15266 - RNA, 21 nt, synthetic construct
  source 1..21: mol_type = other RNA
ccaaccatccctgttttccta

SEQ ID NO: 15267 - RNA, 21 nt, synthetic construct
  source 1..21: mol_type = other RNA
ccaaccccctagccactaagg

SEQ ID NO: 15268 - RNA, 21 nt, synthetic construct
  source 1..21: mol_type = other RNA
ccaacccctccccattcaacc

SEQ ID NO: 15269 - RNA, 21 nt, synthetic construct
  source 1..21: mol_type = other RNA
ccaactgtggggtgactgctt

SEQ ID NO: 15270 - RNA, 21 nt, synthetic construct
  source 1..21: mol_type = other RNA
ccaacttattctgattttgtt

SEQ ID NO: 15271 - RNA, 21 nt, synthetic construct
  source 1..21: mol_type = other RNA
ccaagaagcaggggagctggg

SEQ ID NO: 15272 - RNA, 21 nt, synthetic construct
  source 1..21: mol_type = other RNA
ccaagagcatgaggtcatgga

SEQ ID NO: 15273 - RNA, 21 nt, synthetic construct
  source 1..21: mol_type = other RNA
ccaagaggagaagcagtttgg

SEQ ID NO: 15274 - RNA, 21 nt, synthetic construct
  source 1..21: mol_type = other RNA
ccaagcagtcaccccacagtt

SEQ ID NO: 15275 - RNA, 21 nt, synthetic construct
  source 1..21: mol_type = other RNA
ccaagcatcgcccccctgctg

SEQ ID NO: 15276 - RNA, 21 nt, synthetic construct
  source 1..21: mol_type = other RNA
ccaaggactcaaacccagaag

SEQ ID NO: 15277 - RNA, 21 nt, synthetic construct
  source 1..21: mol_type = other RNA
ccaagggtcaagctcggaaac

SEQ ID NO: 15278 - RNA, 21 nt, synthetic construct
  source 1..21: mol_type = other RNA
ccaagtaggtggcctggggcc

SEQ ID NO: 15279 - RNA, 21 nt, synthetic construct
  source 1..21: mol_type = other RNA
ccaagtccctcacctctccaa

SEQ ID NO: 15280 - RNA, 21 nt, synthetic construct
  source 1..21: mol_type = other RNA
ccaagtggttgataaacccac

SEQ ID NO: 15281 - RNA, 21 nt, synthetic construct
  source 1..21: mol_type = other RNA
ccaagttcttagggtacccca

SEQ ID NO: 15282 - RNA, 21 nt, synthetic construct
  source 1..21: mol_type = other RNA
ccaagttttggacccctaagg

SEQ ID NO: 15283 - RNA, 21 nt, synthetic construct
  source 1..21: mol_type = other RNA
ccaatgctccaggcctcctgg

SEQ ID NO: 15284 - RNA, 21 nt, synthetic construct
  source 1..21: mol_type = other RNA
ccaattgccttagtggctagg

SEQ ID NO: 15285 - RNA, 21 nt, synthetic construct
  source 1..21: mol_type = other RNA
ccaatttatattgttcctccg

SEQ ID NO: 15286 - RNA, 21 nt, synthetic construct
  source 1..21: mol_type = other RNA
ccacaaggcctggggcaagtc

SEQ ID NO: 15287 - RNA, 21 nt, synthetic construct
  source 1..21: mol_type = other RNA
ccacacccagacctgacccaa

SEQ ID NO: 15288 - RNA, 21 nt, synthetic construct
  source 1..21: mol_type = other RNA
ccacacggacacccccctcct

SEQ ID NO: 15289 - RNA, 21 nt, synthetic construct
  source 1..21: mol_type = other RNA
ccacagcaggggggcgatgct

SEQ ID NO: 15290 - RNA, 21 nt, synthetic construct
  source 1..21: mol_type = other RNA
ccacagccctgccaggacggg

SEQ ID NO: 15291 - RNA, 21 nt, synthetic construct
  source 1..21: mol_type = other RNA
ccacaggtggcgcttccagtg

SEQ ID NO: 15292 - RNA, 21 nt, synthetic construct
  source 1..21: mol_type = other RNA
ccacagttggaggagaatcca

SEQ ID NO: 15293 - RNA, 21 nt, synthetic construct
  source 1..21: mol_type = other RNA
ccacatggtacctgttagaca

SEQ ID NO: 15294 - RNA, 21 nt, synthetic construct
  source 1..21: mol_type = other RNA
ccaccatctcatgcccctggc

SEQ ID NO: 15295 - RNA, 21 nt, synthetic construct
  source 1..21: mol_type = other RNA
ccacccaaaaggcagcctggt

SEQ ID NO: 15296 - RNA, 21 nt, synthetic construct
  source 1..21: mol_type = other RNA
ccacccacaggtggcgcttcc

SEQ ID NO: 15297 - RNA, 21 nt, synthetic construct
  source 1..21: mol_type = other RNA
ccacccagtgtccacaaggcc

SEQ ID NO: 15298 - RNA, 21 nt, synthetic construct
  source 1..21: mol_type = other RNA
ccacccagttgtcatggcgat

SEQ ID NO: 15299 - RNA, 21 nt, synthetic construct
  source 1..21: mol_type = other RNA
ccaccccaatgctccaggcct

SEQ ID NO: 15300 - RNA, 21 nt, synthetic construct
  source 1..21: mol_type = other RNA
ccaccccagcagatactctgc

SEQ ID NO: 15301 - RNA, 21 nt, synthetic construct
  source 1..21: mol_type = other RNA
ccaccccagccctgtctacca

SEQ ID NO: 15302 - RNA, 21 nt, synthetic construct
  source 1..21: mol_type = other RNA
ccaccctgcatagccctgggc

SEQ ID NO: 15303 - RNA, 21 nt, synthetic construct
  source 1..21: mol_type = other RNA
ccaccctgcgctaccctctcc

SEQ ID NO: 15304 - RNA, 21 nt, synthetic construct
  source 1..21: mol_type = other RNA
ccaccctgtgctgggacagac

SEQ ID NO: 15305 - RNA, 21 nt, synthetic construct
  source 1..21: mol_type = other RNA
ccaccgtttctcattcttccc

SEQ ID NO: 15306 - RNA, 21 nt, synthetic construct
  source 1..21: mol_type = other RNA
ccacctacttggcctggaccc

SEQ ID NO: 15307 - RNA, 21 nt, synthetic construct
  source 1..21: mol_type = other RNA
ccacctggggctgtgtttctc

SEQ ID NO: 15308 - RNA, 21 nt, synthetic construct
  source 1..21: mol_type = other RNA
ccacctgtgggtggtgacggg

SEQ ID NO: 15309 - RNA, 21 nt, synthetic construct
  source 1..21: mol_type = other RNA
ccacgaaaacagatccaggga

SEQ ID NO: 15310 - RNA, 21 nt, synthetic construct
  source 1..21: mol_type = other RNA
ccacgaaaggactcctggcta

SEQ ID NO: 15311 - RNA, 21 nt, synthetic construct
  source 1..21: mol_type = other RNA
ccacgacctggtgaacaccta

SEQ ID NO: 15312 - RNA, 21 nt, synthetic construct
  source 1..21: mol_type = other RNA
ccacgagaggccaccccagcc

SEQ ID NO: 15313 - RNA, 21 nt, synthetic construct
  source 1..21: mol_type = other RNA
ccacgagtccaggccccagcc

SEQ ID NO: 15314 - RNA, 21 nt, synthetic construct
  source 1..21: mol_type = other RNA
ccacggcttcgttcctgcaga

SEQ ID NO: 15315 - RNA, 21 nt, synthetic construct
  source 1..21: mol_type = other RNA
ccacgggataaattacccccc

SEQ ID NO: 15316 - RNA, 21 nt, synthetic construct
  source 1..21: mol_type = other RNA
ccacggtgtcccagcaagtcg

SEQ ID NO: 15317 - RNA, 21 nt, synthetic construct
  source 1..21: mol_type = other RNA
ccacgtaacctgagaagggaa

SEQ ID NO: 15318 - RNA, 21 nt, synthetic construct
  source 1..21: mol_type = other RNA
ccacgtggggtaccctaagaa

SEQ ID NO: 15319 - RNA, 21 nt, synthetic construct
  source 1..21: mol_type = other RNA
ccacgtgggtttatcaaccac

SEQ ID NO: 15320 - RNA, 21 nt, synthetic construct
  source 1..21: mol_type = other RNA
ccactaaggcaattggggtgc

SEQ ID NO: 15321 - RNA, 21 nt, synthetic construct
  source 1..21: mol_type = other RNA
ccactgagaaccgggcaggtc

SEQ ID NO: 15322 - RNA, 21 nt, synthetic construct
  source 1..21: mol_type = other RNA
ccactgagcactgaaggcctg

SEQ ID NO: 15323 - RNA, 21 nt, synthetic construct
  source 1..21: mol_type = other RNA
ccactggctgtttaagatacg

SEQ ID NO: 15324 - RNA, 21 nt, synthetic construct
  source 1..21: mol_type = other RNA
ccactgggcaaccaggcgtat

SEQ ID NO: 15325 - RNA, 21 nt, synthetic construct
  source 1..21: mol_type = other RNA
ccactgtcctagcaccgtgtc

SEQ ID NO: 15326 - RNA, 21 nt, synthetic construct
  source 1..21: mol_type = other RNA
ccacttggtgaggctggtacc

SEQ ID NO: 15327 - RNA, 21 nt, synthetic construct
  source 1..21: mol_type = other RNA
ccagaacctgagctgctctga

SEQ ID NO: 15328 - RNA, 21 nt, synthetic construct
  source 1..21: mol_type = other RNA
ccagaagcccagagcagggcc

SEQ ID NO: 15329 - RNA, 21 nt, synthetic construct
  source 1..21: mol_type = other RNA
ccagacctgacccaaacccag

SEQ ID NO: 15330 - RNA, 21 nt, synthetic construct
  source 1..21: mol_type = other RNA
ccagacggccgcgtcagagca

SEQ ID NO: 15331 - RNA, 21 nt, synthetic construct
  source 1..21: mol_type = other RNA
ccagagacagtgaccaaccat

SEQ ID NO: 15332 - RNA, 21 nt, synthetic construct
  source 1..21: mol_type = other RNA
ccagagcagggccttagggaa

SEQ ID NO: 15333 - RNA, 21 nt, synthetic construct
  source 1..21: mol_type = other RNA
ccagagcagggtcccgcttcc

SEQ ID NO: 15334 - RNA, 21 nt, synthetic construct
  source 1..21: mol_type = other RNA
ccagaggccccaggccaccta

SEQ ID NO: 15335 - RNA, 21 nt, synthetic construct
  source 1..21: mol_type = other RNA
ccagaggctgttgggtcattt

SEQ ID NO: 15336 - RNA, 21 nt, synthetic construct
  source 1..21: mol_type = other RNA
ccagagggagccacgaaaaca

SEQ ID NO: 15337 - RNA, 21 nt, synthetic construct
  source 1..21: mol_type = other RNA
ccagaggggtgagacagctgc

SEQ ID NO: 15338 - RNA, 21 nt, synthetic construct
  source 1..21: mol_type = other RNA
ccagagtccaggcccaacccc

SEQ ID NO: 15339 - RNA, 21 nt, synthetic construct
  source 1..21: mol_type = other RNA
ccagatagcactggggactct

SEQ ID NO: 15340 - RNA, 21 nt, synthetic construct
  source 1..21: mol_type = other RNA
ccagatgagaagccccctccc

SEQ ID NO: 15341 - RNA, 21 nt, synthetic construct
  source 1..21: mol_type = other RNA
ccagatgggcagctttggaga

SEQ ID NO: 15342 - RNA, 21 nt, synthetic construct
  source 1..21: mol_type = other RNA
ccagcaagtcgggactccaga

SEQ ID NO: 15343 - RNA, 21 nt, synthetic construct
  source 1..21: mol_type = other RNA
ccagcacagggtggccttcct

SEQ ID NO: 15344 - RNA, 21 nt, synthetic construct
  source 1..21: mol_type = other RNA
ccagcagatactctgcaggaa

SEQ ID NO: 15345 - RNA, 21 nt, synthetic construct
  source 1..21: mol_type = other RNA
ccagccaggtccttccaaggg

SEQ ID NO: 15346 - RNA, 21 nt, synthetic construct
  source 1..21: mol_type = other RNA
ccagcccaccccaatgctcca

SEQ ID NO: 15347 - RNA, 21 nt, synthetic construct
  source 1..21: mol_type = other RNA
ccagccccgcctccctaagac

SEQ ID NO: 15348 - RNA, 21 nt, synthetic construct
  source 1..21: mol_type = other RNA
ccagccccgtcctggcagggc

SEQ ID NO: 15349 - RNA, 21 nt, synthetic construct
  source 1..21: mol_type = other RNA
ccagcccctcctactctagcc

SEQ ID NO: 15350 - RNA, 21 nt, synthetic construct
  source 1..21: mol_type = other RNA
ccagcccctcctccctcagac

SEQ ID NO: 15351 - RNA, 21 nt, synthetic construct
  source 1..21: mol_type = other RNA
ccagcccctcctccttcagag

SEQ ID NO: 15352 - RNA, 21 nt, synthetic construct
  source 1..21: mol_type = other RNA
ccagcccctcctctctcaaac

SEQ ID NO: 15353 - RNA, 21 nt, synthetic construct
  source 1..21: mol_type = other RNA
ccagcccctcctgccttaaac

SEQ ID NO: 15354 - RNA, 21 nt, synthetic construct
  source 1..21: mol_type = other RNA
ccagccctgtctaccaggctg

SEQ ID NO: 15355 - RNA, 21 nt, synthetic construct
  source 1..21: mol_type = other RNA
ccagcccttccgccctcagat

SEQ ID NO: 15356 - RNA, 21 nt, synthetic construct
  source 1..21: mol_type = other RNA
ccagcctcaccaagtggttga

SEQ ID NO: 15357 - RNA, 21 nt, synthetic construct
  source 1..21: mol_type = other RNA
ccagcctctccccattcagac

SEQ ID NO: 15358 - RNA, 21 nt, synthetic construct
  source 1..21: mol_type = other RNA
ccagctcccctgcttcttggc

SEQ ID NO: 15359 - RNA, 21 nt, synthetic construct
  source 1..21: mol_type = other RNA
ccagctcttctctgttcagcc

SEQ ID NO: 15360 - RNA, 21 nt, synthetic construct
  source 1..21: mol_type = other RNA
ccagcttatgctgtttgccca

SEQ ID NO: 15361 - RNA, 21 nt, synthetic construct
  source 1..21: mol_type = other RNA
ccaggaacccctgtagggaag

SEQ ID NO: 15362 - RNA, 21 nt, synthetic construct
  source 1..21: mol_type = other RNA
ccaggacagcctagttttagc

SEQ ID NO: 15363 - RNA, 21 nt, synthetic construct
  source 1..21: mol_type = other RNA
ccaggacggggctggctactg

SEQ ID NO: 15364 - RNA, 21 nt, synthetic construct
  source 1..21: mol_type = other RNA
ccaggactcctggctctgaag

SEQ ID NO: 15365 - RNA, 21 nt, synthetic construct
  source 1..21: mol_type = other RNA
ccaggagaggcgctcaggctt

SEQ ID NO: 15366 - RNA, 21 nt, synthetic construct
  source 1..21: mol_type = other RNA
ccaggagcccaggcccccagc

SEQ ID NO: 15367 - RNA, 21 nt, synthetic construct
  source 1..21: mol_type = other RNA
ccaggaggccaggccccagcc

SEQ ID NO: 15368 - RNA, 21 nt, synthetic construct
  source 1..21: mol_type = other RNA
ccaggaggcctggagcattgg

SEQ ID NO: 15369 - RNA, 21 nt, synthetic construct
  source 1..21: mol_type = other RNA
ccaggagtccaggcccccagt

SEQ ID NO: 15370 - RNA, 21 nt, synthetic construct
  source 1..21: mol_type = other RNA
ccaggagtcctggcccccagc

SEQ ID NO: 15371 - RNA, 21 nt, synthetic construct
  source 1..21: mol_type = other RNA
ccaggagtcctttcgtggttt

SEQ ID NO: 15372 - RNA, 21 nt, synthetic construct
  source 1..21: mol_type = other RNA
ccaggatcagtgaaacgcacc

SEQ ID NO: 15373 - RNA, 21 nt, synthetic construct
  source 1..21: mol_type = other RNA
ccaggattcttagggctgaac

SEQ ID NO: 15374 - RNA, 21 nt, synthetic construct
  source 1..21: mol_type = other RNA
ccaggcacacaggtgtgcagc

SEQ ID NO: 15375 - RNA, 21 nt, synthetic construct
  source 1..21: mol_type = other RNA
ccaggcaggtccccaagcatc

SEQ ID NO: 15376 - RNA, 21 nt, synthetic construct
  source 1..21: mol_type = other RNA
ccaggccaagtaggtggcctg

SEQ ID NO: 15377 - RNA, 21 nt, synthetic construct
  source 1..21: mol_type = other RNA
ccaggccacctacttggcctg

SEQ ID NO: 15378 - RNA, 21 nt, synthetic construct
  source 1..21: mol_type = other RNA
ccaggcccaacccctccccat

SEQ ID NO: 15379 - RNA, 21 nt, synthetic construct
  source 1..21: mol_type = other RNA
ccaggcccagccccgcctccc

SEQ ID NO: 15380 - RNA, 21 nt, synthetic construct
  source 1..21: mol_type = other RNA
ccaggccccagcccctcctct

SEQ ID NO: 15381 - RNA, 21 nt, synthetic construct
  source 1..21: mol_type = other RNA
ccaggccccagcccttccgcc

SEQ ID NO: 15382 - RNA, 21 nt, synthetic construct
  source 1..21: mol_type = other RNA
ccaggcccccagcctctcccc

SEQ ID NO: 15383 - RNA, 21 nt, synthetic construct
  source 1..21: mol_type = other RNA
ccaggcccccagctcttctct

SEQ ID NO: 15384 - RNA, 21 nt, synthetic construct
  source 1..21: mol_type = other RNA
ccaggcccccagtccctccac

SEQ ID NO: 15385 - RNA, 21 nt, synthetic construct
  source 1..21: mol_type = other RNA
ccaggcccctgagtctgtccc

SEQ ID NO: 15386 - RNA, 21 nt, synthetic construct
  source 1..21: mol_type = other RNA
ccaggcctcaggcatctttca

SEQ ID NO: 15387 - RNA, 21 nt, synthetic construct
  source 1..21: mol_type = other RNA
ccaggcctcctgggatacccc

SEQ ID NO: 15388 - RNA, 21 nt, synthetic construct
  source 1..21: mol_type = other RNA
ccaggccttcagtgctcagtg

SEQ ID NO: 15389 - RNA, 21 nt, synthetic construct
  source 1..21: mol_type = other RNA
ccaggccttgtggacactggg

SEQ ID NO: 15390 - RNA, 21 nt, synthetic construct
  source 1..21: mol_type = other RNA
ccaggcgtatcttaaacagcc

SEQ ID NO: 15391 - RNA, 21 nt, synthetic construct
  source 1..21: mol_type = other RNA
ccaggctgccttttgggtgga

SEQ ID NO: 15392 - RNA, 21 nt, synthetic construct
  source 1..21: mol_type = other RNA
ccaggctgtcacactccagtt

SEQ ID NO: 15393 - RNA, 21 nt, synthetic construct
  source 1..21: mol_type = other RNA
ccagggacacggtgctaggac

SEQ ID NO: 15394 - RNA, 21 nt, synthetic construct
  source 1..21: mol_type = other RNA
ccagggactccagagtccagg

SEQ ID NO: 15395 - RNA, 21 nt, synthetic construct
  source 1..21: mol_type = other RNA
ccagggcacgtgcggcccctt

SEQ ID NO: 15396 - RNA, 21 nt, synthetic construct
  source 1..21: mol_type = other RNA
ccagggctatgcagggtggag

SEQ ID NO: 15397 - RNA, 21 nt, synthetic construct
  source 1..21: mol_type = other RNA
ccaggggcatgagatggtgga

SEQ ID NO: 15398 - RNA, 21 nt, synthetic construct
  source 1..21: mol_type = other RNA
ccaggggctgacacgggccac

SEQ ID NO: 15399 - RNA, 21 nt, synthetic construct
  source 1..21: mol_type = other RNA
ccagggggtcggaggagggac

SEQ ID NO: 15400 - RNA, 21 nt, synthetic construct
  source 1..21: mol_type = other RNA
ccaggtccttccaagggtcaa

SEQ ID NO: 15401 - RNA, 21 nt, synthetic construct
  source 1..21: mol_type = other RNA
ccaggtcgtggccgcctctac

SEQ ID NO: 15402 - RNA, 21 nt, synthetic construct
  source 1..21: mol_type = other RNA
ccaggtggagaaactggccgg

SEQ ID NO: 15403 - RNA, 21 nt, synthetic construct
  source 1..21: mol_type = other RNA
ccagtacaggcatccctgtga

SEQ ID NO: 15404 - RNA, 21 nt, synthetic construct
  source 1..21: mol_type = other RNA
ccagtagccagccccgtcctg

SEQ ID NO: 15405 - RNA, 21 nt, synthetic construct
  source 1..21: mol_type = other RNA
ccagtccctccaccctcagac

SEQ ID NO: 15406 - RNA, 21 nt, synthetic construct
  source 1..21: mol_type = other RNA
ccagtgctatctgggacatat

SEQ ID NO: 15407 - RNA, 21 nt, synthetic construct
  source 1..21: mol_type = other RNA
ccagtgctcagactagggaag

SEQ ID NO: 15408 - RNA, 21 nt, synthetic construct
  source 1..21: mol_type = other RNA
ccagtggccagaggctgttgg

SEQ ID NO: 15409 - RNA, 21 nt, synthetic construct
  source 1..21: mol_type = other RNA
ccagtggtcaggccggccagg

SEQ ID NO: 15410 - RNA, 21 nt, synthetic construct
  source 1..21: mol_type = other RNA
ccagtgtccacaaggcctggg

SEQ ID NO: 15411 - RNA, 21 nt, synthetic construct
  source 1..21: mol_type = other RNA
ccagttcactgaggccccctc

SEQ ID NO: 15412 - RNA, 21 nt, synthetic construct
  source 1..21: mol_type = other RNA
ccagttcaggtcccggagccc

SEQ ID NO: 15413 - RNA, 21 nt, synthetic construct
  source 1..21: mol_type = other RNA
ccagttgtcatggcgataggg

SEQ ID NO: 15414 - RNA, 21 nt, synthetic construct
  source 1..21: mol_type = other RNA
ccagtttctccacctggggct

SEQ ID NO: 15415 - RNA, 21 nt, synthetic construct
  source 1..21: mol_type = other RNA
ccatccctgttttcctaggac

SEQ ID NO: 15416 - RNA, 21 nt, synthetic construct
  source 1..21: mol_type = other RNA
ccatccttctttccttaaaga

SEQ ID NO: 15417 - RNA, 21 nt, synthetic construct
  source 1..21: mol_type = other RNA
ccatctcatgcccctggctct

SEQ ID NO: 15418 - RNA, 21 nt, synthetic construct
  source 1..21: mol_type = other RNA
ccatctggaggaggcgggagg

SEQ ID NO: 15419 - RNA, 21 nt, synthetic construct
  source 1..21: mol_type = other RNA
ccatgacaactgggtggaaat

SEQ ID NO: 15420 - RNA, 21 nt, synthetic construct
  source 1..21: mol_type = other RNA
ccatgacctcatgctcttggc

SEQ ID NO: 15421 - RNA, 21 nt, synthetic construct
  source 1..21: mol_type = other RNA
ccatgtggggttcccgcaccc

SEQ ID NO: 15422 - RNA, 21 nt, synthetic construct
  source 1..21: mol_type = other RNA
ccattcaacccaggaggccag

SEQ ID NO: 15423 - RNA, 21 nt, synthetic construct
  source 1..21: mol_type = other RNA
ccattcagacccaggggtcca

SEQ ID NO: 15424 - RNA, 21 nt, synthetic construct
  source 1..21: mol_type = other RNA
ccattcctgcaccccaattgc

SEQ ID NO: 15425 - RNA, 21 nt, synthetic construct
  source 1..21: mol_type = other RNA
ccattctcacaaagggagttt

SEQ ID NO: 15426 - RNA, 21 nt, synthetic construct
  source 1..21: mol_type = other RNA
ccattgctctccttgcccccc

SEQ ID NO: 15427 - RNA, 21 nt, synthetic construct
  source 1..21: mol_type = other RNA
cccaaaaggcagcctggtaga

SEQ ID NO: 15428 - RNA, 21 nt, synthetic construct
  source 1..21: mol_type = other RNA
cccaaacccagctcccctgct

SEQ ID NO: 15429 - RNA, 21 nt, synthetic construct
  source 1..21: mol_type = other RNA
cccaacagcctctggccactg

SEQ ID NO: 15430 - RNA, 21 nt, synthetic construct
  source 1..21: mol_type = other RNA
cccaaccccctagccactaag

SEQ ID NO: 15431 - RNA, 21 nt, synthetic construct
  source 1..21: mol_type = other RNA
cccaacccctccccattcaac

SEQ ID NO: 15432 - RNA, 21 nt, synthetic construct
  source 1..21: mol_type = other RNA
cccaagaggagaagcagtttg

SEQ ID NO: 15433 - RNA, 21 nt, synthetic construct
  source 1..21: mol_type = other RNA
cccaagcatcgcccccctgct

SEQ ID NO: 15434 - RNA, 21 nt, synthetic construct
  source 1..21: mol_type = other RNA
cccaagtccctcacctctcca

SEQ ID NO: 15435 - RNA, 21 nt, synthetic construct
  source 1..21: mol_type = other RNA
cccaagttcttagggtacccc

SEQ ID NO: 15436 - RNA, 21 nt, synthetic construct
  source 1..21: mol_type = other RNA
cccaagttttggacccctaag

SEQ ID NO: 15437 - RNA, 21 nt, synthetic construct
  source 1..21: mol_type = other RNA
cccaatgctccaggcctcctg

SEQ ID NO: 15438 - RNA, 21 nt, synthetic construct
  source 1..21: mol_type = other RNA
cccaattgccttagtggctag

SEQ ID NO: 15439 - RNA, 21 nt, synthetic construct
  source 1..21: mol_type = other RNA
cccaatttatattgttcctcc

SEQ ID NO: 15440 - RNA, 21 nt, synthetic construct
  source 1..21: mol_type = other RNA
cccacacccagacctgaccca

SEQ ID NO: 15441 - RNA, 21 nt, synthetic construct
  source 1..21: mol_type = other RNA
cccacaggtggcgcttccagt

SEQ ID NO: 15442 - RNA, 21 nt, synthetic construct
  source 1..21: mol_type = other RNA
cccacagttggaggagaatcc

SEQ ID NO: 15443 - RNA, 21 nt, synthetic construct
  source 1..21: mol_type = other RNA
cccacatggtacctgttagac

SEQ ID NO: 15444 - RNA, 21 nt, synthetic construct
  source 1..21: mol_type = other RNA
cccacccagtgtccacaaggc

SEQ ID NO: 15445 - RNA, 21 nt, synthetic construct
  source 1..21: mol_type = other RNA
cccaccccaatgctccaggcc

SEQ ID NO: 15446 - RNA, 21 nt, synthetic construct
  source 1..21: mol_type = other RNA
cccacgagaggccaccccagc

SEQ ID NO: 15447 - RNA, 21 nt, synthetic construct
  source 1..21: mol_type = other RNA
cccacgagtccaggccccagc

SEQ ID NO: 15448 - RNA, 21 nt, synthetic construct
  source 1..21: mol_type = other RNA
cccacggcttcgttcctgcag

SEQ ID NO: 15449 - RNA, 21 nt, synthetic construct
  source 1..21: mol_type = other RNA
cccacgtggggtaccctaaga

SEQ ID NO: 15450 - RNA, 21 nt, synthetic construct
  source 1..21: mol_type = other RNA
cccacgtgggtttatcaacca

SEQ ID NO: 15451 - RNA, 21 nt, synthetic construct
  source 1..21: mol_type = other RNA
cccactgtcctagcaccgtgt

SEQ ID NO: 15452 - RNA, 21 nt, synthetic construct
  source 1..21: mol_type = other RNA
cccagaacctgagctgctctg

SEQ ID NO: 15453 - RNA, 21 nt, synthetic construct
  source 1..21: mol_type = other RNA
cccagaagcccagagcagggc

SEQ ID NO: 15454 - RNA, 21 nt, synthetic construct
  source 1..21: mol_type = other RNA
cccagacctgacccaaaccca

SEQ ID NO: 15455 - RNA, 21 nt, synthetic construct
  source 1..21: mol_type = other RNA
cccagagacagtgaccaacca

SEQ ID NO: 15456 - RNA, 21 nt, synthetic construct
  source 1..21: mol_type = other RNA
cccagagcagggccttaggga

SEQ ID NO: 15457 - RNA, 21 nt, synthetic construct
  source 1..21: mol_type = other RNA
cccagagcagggtcccgcttc

SEQ ID NO: 15458 - RNA, 21 nt, synthetic construct
  source 1..21: mol_type = other RNA
cccagaggccccaggccacct

SEQ ID NO: 15459 - RNA, 21 nt, synthetic construct
  source 1..21: mol_type = other RNA
cccagaggggtgagacagctg

SEQ ID NO: 15460 - RNA, 21 nt, synthetic construct
  source 1..21: mol_type = other RNA
cccagatagcactggggactc

SEQ ID NO: 15461 - RNA, 21 nt, synthetic construct
  source 1..21: mol_type = other RNA
cccagatgagaagccccctcc

SEQ ID NO: 15462 - RNA, 21 nt, synthetic construct
  source 1..21: mol_type = other RNA
cccagcaagtcgggactccag

SEQ ID NO: 15463 - RNA, 21 nt, synthetic construct
  source 1..21: mol_type = other RNA
cccagcacagggtggccttcc

SEQ ID NO: 15464 - RNA, 21 nt, synthetic construct
  source 1..21: mol_type = other RNA
cccagcagatactctgcagga

SEQ ID NO: 15465 - RNA, 21 nt, synthetic construct
  source 1..21: mol_type = other RNA
cccagccaggtccttccaagg

SEQ ID NO: 15466 - RNA, 21 nt, synthetic construct
  source 1..21: mol_type = other RNA
cccagcccaccccaatgctcc

SEQ ID NO: 15467 - RNA, 21 nt, synthetic construct
  source 1..21: mol_type = other RNA
cccagccccgcctccctaaga

SEQ ID NO: 15468 - RNA, 21 nt, synthetic construct
  source 1..21: mol_type = other RNA
cccagcccctcctccctcaga

SEQ ID NO: 15469 - RNA, 21 nt, synthetic construct
  source 1..21: mol_type = other RNA
cccagcccctcctctctcaaa

SEQ ID NO: 15470 - RNA, 21 nt, synthetic construct
  source 1..21: mol_type = other RNA
cccagcccctcctgccttaaa

SEQ ID NO: 15471 - RNA, 21 nt, synthetic construct
  source 1..21: mol_type = other RNA
cccagccctgtctaccaggct

SEQ ID NO: 15472 - RNA, 21 nt, synthetic construct
  source 1..21: mol_type = other RNA
cccagcccttccgccctcaga

SEQ ID NO: 15473 - RNA, 21 nt, synthetic construct
  source 1..21: mol_type = other RNA
cccagcctctccccattcaga

SEQ ID NO: 15474 - RNA, 21 nt, synthetic construct
  source 1..21: mol_type = other RNA
cccagctcccctgcttcttgg

SEQ ID NO: 15475 - RNA, 21 nt, synthetic construct
  source 1..21: mol_type = other RNA
cccagctcttctctgttcagc

SEQ ID NO: 15476 - RNA, 21 nt, synthetic construct
  source 1..21: mol_type = other RNA
cccaggacagcctagttttag

SEQ ID NO: 15477 - RNA, 21 nt, synthetic construct
  source 1..21: mol_type = other RNA
cccaggagaggcgctcaggct

SEQ ID NO: 15478 - RNA, 21 nt, synthetic construct
  source 1..21: mol_type = other RNA
cccaggagcccaggcccccag

SEQ ID NO: 15479 - RNA, 21 nt, synthetic construct
  source 1..21: mol_type = other RNA
cccaggaggccaggccccagc

SEQ ID NO: 15480 - RNA, 21 nt, synthetic construct
  source 1..21: mol_type = other RNA
cccaggaggcctggagcattg

SEQ ID NO: 15481 - RNA, 21 nt, synthetic construct
  source 1..21: mol_type = other RNA
cccaggagtccaggcccccag

SEQ ID NO: 15482 - RNA, 21 nt, synthetic construct
  source 1..21: mol_type = other RNA
cccaggcacacaggtgtgcag

SEQ ID NO: 15483 - RNA, 21 nt, synthetic construct
  source 1..21: mol_type = other RNA
cccaggccacctacttggcct

SEQ ID NO: 15484 - RNA, 21 nt, synthetic construct
  source 1..21: mol_type = other RNA
cccaggcccccagctcttctc

SEQ ID NO: 15485 - RNA, 21 nt, synthetic construct
  source 1..21: mol_type = other RNA
cccaggcccctgagtctgtcc

SEQ ID NO: 15486 - RNA, 21 nt, synthetic construct
  source 1..21: mol_type = other RNA
cccaggcctcaggcatctttc

SEQ ID NO: 15487 - RNA, 21 nt, synthetic construct
  source 1..21: mol_type = other RNA
cccaggccttgtggacactgg

SEQ ID NO: 15488 - RNA, 21 nt, synthetic construct
  source 1..21: mol_type = other RNA
cccaggctgtcacactccagt

SEQ ID NO: 15489 - RNA, 21 nt, synthetic construct
  source 1..21: mol_type = other RNA
cccagggcacgtgcggcccct

SEQ ID NO: 15490 - RNA, 21 nt, synthetic construct
  source 1..21: mol_type = other RNA
cccagggctatgcagggtgga

SEQ ID NO: 15491 - RNA, 21 nt, synthetic construct
  source 1..21: mol_type = other RNA
cccaggtggagaaactggccg

SEQ ID NO: 15492 - RNA, 21 nt, synthetic construct
  source 1..21: mol_type = other RNA
cccagtacaggcatccctgtg

SEQ ID NO: 15493 - RNA, 21 nt, synthetic construct
  source 1..21: mol_type = other RNA
cccagtccctccaccctcaga

SEQ ID NO: 15494 - RNA, 21 nt, synthetic construct
  source 1..21: mol_type = other RNA
cccagtgctatctgggacata

SEQ ID NO: 15495 - RNA, 21 nt, synthetic construct
  source 1..21: mol_type = other RNA
cccagtggtcaggccggccag

SEQ ID NO: 15496 - RNA, 21 nt, synthetic construct
  source 1..21: mol_type = other RNA
cccagtgtccacaaggcctgg

SEQ ID NO: 15497 - RNA, 21 nt, synthetic construct
  source 1..21: mol_type = other RNA
cccagttgtcatggcgatagg

SEQ ID NO: 15498 - RNA, 21 nt, synthetic construct
  source 1..21: mol_type = other RNA
cccatctggaggaggcgggag

SEQ ID NO: 15499 - RNA, 21 nt, synthetic construct
  source 1..21: mol_type = other RNA
cccattcaacccaggaggcca

SEQ ID NO: 15500 - RNA, 21 nt, synthetic construct
  source 1..21: mol_type = other RNA
cccattcagacccaggggtcc

SEQ ID NO: 15501 - RNA, 21 nt, synthetic construct
  source 1..21: mol_type = other RNA
cccattcctgcaccccaattg

SEQ ID NO: 15502 - RNA, 21 nt, synthetic construct
  source 1..21: mol_type = other RNA
cccattgctctccttgccccc

SEQ ID NO: 15503 - RNA, 21 nt, synthetic construct
  source 1..21: mol_type = other RNA
ccccaaccccctagccactaa

SEQ ID NO: 15504 - RNA, 21 nt, synthetic construct
  source 1..21: mol_type = other RNA
ccccaagcatcgcccccctgc

SEQ ID NO: 15505 - RNA, 21 nt, synthetic construct
  source 1..21: mol_type = other RNA
ccccaagtccctcacctctcc

SEQ ID NO: 15506 - RNA, 21 nt, synthetic construct
  source 1..21: mol_type = other RNA
ccccaagttttggacccctaa

SEQ ID NO: 15507 - RNA, 21 nt, synthetic construct
  source 1..21: mol_type = other RNA
ccccaatgctccaggcctcct

SEQ ID NO: 15508 - RNA, 21 nt, synthetic construct
  source 1..21: mol_type = other RNA
ccccaattgccttagtggcta

SEQ ID NO: 15509 - RNA, 21 nt, synthetic construct
  source 1..21: mol_type = other RNA
ccccaatttatattgttcctc

SEQ ID NO: 15510 - RNA, 21 nt, synthetic construct
  source 1..21: mol_type = other RNA
ccccacacccagacctgaccc

SEQ ID NO: 15511 - RNA, 21 nt, synthetic construct
  source 1..21: mol_type = other RNA
ccccacagttggaggagaatc

SEQ ID NO: 15512 - RNA, 21 nt, synthetic construct
  source 1..21: mol_type = other RNA
ccccacatggtacctgttaga

SEQ ID NO: 15513 - RNA, 21 nt, synthetic construct
  source 1..21: mol_type = other RNA
ccccacgagaggccaccccag

SEQ ID NO: 15514 - RNA, 21 nt, synthetic construct
  source 1..21: mol_type = other RNA
ccccacgtgggtttatcaacc

SEQ ID NO: 15515 - RNA, 21 nt, synthetic construct
  source 1..21: mol_type = other RNA
ccccactgtcctagcaccgtg

SEQ ID NO: 15516 - RNA, 21 nt, synthetic construct
  source 1..21: mol_type = other RNA
ccccagaggccccaggccacc

SEQ ID NO: 15517 - RNA, 21 nt, synthetic construct
  source 1..21: mol_type = other RNA
ccccagcagatactctgcagg

SEQ ID NO: 15518 - RNA, 21 nt, synthetic construct
  source 1..21: mol_type = other RNA
ccccagcccaccccaatgctc

SEQ ID NO: 15519 - RNA, 21 nt, synthetic construct
  source 1..21: mol_type = other RNA
ccccagcccctcctccctcag

SEQ ID NO: 15520 - RNA, 21 nt, synthetic construct
  source 1..21: mol_type = other RNA
ccccagcccctcctctctcaa

SEQ ID NO: 15521 - RNA, 21 nt, synthetic construct
  source 1..21: mol_type = other RNA
ccccagcccctcctgccttaa

SEQ ID NO: 15522 - RNA, 21 nt, synthetic construct
  source 1..21: mol_type = other RNA
ccccagccctgtctaccaggc

SEQ ID NO: 15523 - RNA, 21 nt, synthetic construct
  source 1..21: mol_type = other RNA
ccccagcccttccgccctcag

SEQ ID NO: 15524 - RNA, 21 nt, synthetic construct
  source 1..21: mol_type = other RNA
ccccagcctctccccattcag

SEQ ID NO: 15525 - RNA, 21 nt, synthetic construct
  source 1..21: mol_type = other RNA
ccccagctcttctctgttcag

SEQ ID NO: 15526 - RNA, 21 nt, synthetic construct
  source 1..21: mol_type = other RNA
ccccaggccacctacttggcc

SEQ ID NO: 15527 - RNA, 21 nt, synthetic construct
  source 1..21: mol_type = other RNA
ccccaggccttgtggacactg

SEQ ID NO: 15528 - RNA, 21 nt, synthetic construct
  source 1..21: mol_type = other RNA
ccccaggctgtcacactccag

SEQ ID NO: 15529 - RNA, 21 nt, synthetic construct
  source 1..21: mol_type = other RNA
ccccaggtggagaaactggcc

SEQ ID NO: 15530 - RNA, 21 nt, synthetic construct
  source 1..21: mol_type = other RNA
ccccagtccctccaccctcag

SEQ ID NO: 15531 - RNA, 21 nt, synthetic construct
  source 1..21: mol_type = other RNA
ccccagtgctatctgggacat

SEQ ID NO: 15532 - RNA, 21 nt, synthetic construct
  source 1..21: mol_type = other RNA
ccccattcaacccaggaggcc

SEQ ID NO: 15533 - RNA, 21 nt, synthetic construct
  source 1..21: mol_type = other RNA
ccccattcagacccaggggtc

SEQ ID NO: 15534 - RNA, 21 nt, synthetic construct
  source 1..21: mol_type = other RNA
ccccattcctgcaccccaatt

SEQ ID NO: 15535 - RNA, 21 nt, synthetic construct
  source 1..21: mol_type = other RNA
cccccaaccccctagccacta

SEQ ID NO: 15536 - RNA, 21 nt, synthetic construct
  source 1..21: mol_type = other RNA
cccccaagtccctcacctctc

SEQ ID NO: 15537 - RNA, 21 nt, synthetic construct
  source 1..21: mol_type = other RNA
cccccaagttttggaccccta

SEQ ID NO: 15538 - RNA, 21 nt, synthetic construct
  source 1..21: mol_type = other RNA
cccccagaggccccaggccac

SEQ ID NO: 15539 - RNA, 21 nt, synthetic construct
  source 1..21: mol_type = other RNA
cccccagcccctcctccctca

SEQ ID NO: 15540 - RNA, 21 nt, synthetic construct
  source 1..21: mol_type = other RNA
cccccagcccctcctgcctta

SEQ ID NO: 15541 - RNA, 21 nt, synthetic construct
  source 1..21: mol_type = other RNA
cccccagcctctccccattca

SEQ ID NO: 15542 - RNA, 21 nt, synthetic construct
  source 1..21: mol_type = other RNA
cccccagctcttctctgttca

SEQ ID NO: 15543 - RNA, 21 nt, synthetic construct
  source 1..21: mol_type = other RNA
cccccagtccctccaccctca

SEQ ID NO: 15544 - RNA, 21 nt, synthetic construct
  source 1..21: mol_type = other RNA
cccccattcctgcaccccaat

SEQ ID NO: 15545 - RNA, 21 nt, synthetic construct
  source 1..21: mol_type = other RNA
ccccccaagtccctcacctct

SEQ ID NO: 15546 - RNA, 21 nt, synthetic construct
  source 1..21: mol_type = other RNA
ccccccaagttttggacccct

SEQ ID NO: 15547 - RNA, 21 nt, synthetic construct
  source 1..21: mol_type = other RNA
cccccctcccctatcgccatg

SEQ ID NO: 15548 - RNA, 21 nt, synthetic construct
  source 1..21: mol_type = other RNA
cccccctcctcaccacagccc

SEQ ID NO: 15549 - RNA, 21 nt, synthetic construct
  source 1..21: mol_type = other RNA
cccccctgctgtggctgttcc

SEQ ID NO: 15550 - RNA, 21 nt, synthetic construct
  source 1..21: mol_type = other RNA
cccccgtcaccacccacaggt

SEQ ID NO: 15551 - RNA, 21 nt, synthetic construct
  source 1..21: mol_type = other RNA
ccccctagccactaaggcaat

SEQ ID NO: 15552 - RNA, 21 nt, synthetic construct
  source 1..21: mol_type = other RNA
ccccctcccctatcgccatga

SEQ ID NO: 15553 - RNA, 21 nt, synthetic construct
  source 1..21: mol_type = other RNA
ccccctcccttccccgttcac

SEQ ID NO: 15554 - RNA, 21 nt, synthetic construct
  source 1..21: mol_type = other RNA
ccccctcctcaccacagccct

SEQ ID NO: 15555 - RNA, 21 nt, synthetic construct
  source 1..21: mol_type = other RNA
ccccctctgcacggggccctg

SEQ ID NO: 15556 - RNA, 21 nt, synthetic construct
  source 1..21: mol_type = other RNA
ccccctgctgtggctgttccc

SEQ ID NO: 15557 - RNA, 21 nt, synthetic construct
  source 1..21: mol_type = other RNA
ccccctggacttcggcttttg

SEQ ID NO: 15558 - RNA, 21 nt, synthetic construct
  source 1..21: mol_type = other RNA
cccccttcccctgcatccccc

SEQ ID NO: 15559 - RNA, 21 nt, synthetic construct
  source 1..21: mol_type = other RNA
cccccttcctcgtccaccatc

SEQ ID NO: 15560 - RNA, 21 nt, synthetic construct
  source 1..21: mol_type = other RNA
ccccgaagagtgagtttgcca

SEQ ID NO: 15561 - RNA, 21 nt, synthetic construct
  source 1..21: mol_type = other RNA
ccccgcctccctaagacccag

SEQ ID NO: 15562 - RNA, 21 nt, synthetic construct
  source 1..21: mol_type = other RNA
ccccgtcaccacccacaggtg

SEQ ID NO: 15563 - RNA, 21 nt, synthetic construct
  source 1..21: mol_type = other RNA
ccccgtcctggcagggctgtg

SEQ ID NO: 15564 - RNA, 21 nt, synthetic construct
  source 1..21: mol_type = other RNA
ccccgtgcagagggggcctca

SEQ ID NO: 15565 - RNA, 21 nt, synthetic construct
  source 1..21: mol_type = other RNA
ccccgttcacttcctgtttgc

SEQ ID NO: 15566 - RNA, 21 nt, synthetic construct
  source 1..21: mol_type = other RNA
ccccgttcccctgcatccccc

SEQ ID NO: 15567 - RNA, 21 nt, synthetic construct
  source 1..21: mol_type = other RNA
ccccgttcccctgcatccccg

SEQ ID NO: 15568 - RNA, 21 nt, synthetic construct
  source 1..21: mol_type = other RNA
cccctaagggaagaatgagaa

SEQ ID NO: 15569 - RNA, 21 nt, synthetic construct
  source 1..21: mol_type = other RNA
cccctagccactaaggcaatt

SEQ ID NO: 15570 - RNA, 21 nt, synthetic construct
  source 1..21: mol_type = other RNA
cccctatcgccatgacaactg

SEQ ID NO: 15571 - RNA, 21 nt, synthetic construct
  source 1..21: mol_type = other RNA
cccctccccattcaacccagg

SEQ ID NO: 15572 - RNA, 21 nt, synthetic construct
  source 1..21: mol_type = other RNA
cccctcccctatcgccatgac

SEQ ID NO: 15573 - RNA, 21 nt, synthetic construct
  source 1..21: mol_type = other RNA
cccctcccttccccgttcact

SEQ ID NO: 15574 - RNA, 21 nt, synthetic construct
  source 1..21: mol_type = other RNA
cccctcctactctagccccca

SEQ ID NO: 15575 - RNA, 21 nt, synthetic construct
  source 1..21: mol_type = other RNA
cccctcctcaccacagccctg

SEQ ID NO: 15576 - RNA, 21 nt, synthetic construct
  source 1..21: mol_type = other RNA
cccctcctccttcagagccag

SEQ ID NO: 15577 - RNA, 21 nt, synthetic construct
  source 1..21: mol_type = other RNA
cccctcctctctcaaacccag

SEQ ID NO: 15578 - RNA, 21 nt, synthetic construct
  source 1..21: mol_type = other RNA
cccctcctgccttaaacccag

SEQ ID NO: 15579 - RNA, 21 nt, synthetic construct
  source 1..21: mol_type = other RNA
cccctctgcacggggccctgc

SEQ ID NO: 15580 - RNA, 21 nt, synthetic construct
  source 1..21: mol_type = other RNA
cccctctgggagtcccgccca

SEQ ID NO: 15581 - RNA, 21 nt, synthetic construct
  source 1..21: mol_type = other RNA
cccctgagtctgtcccagcac

SEQ ID NO: 15582 - RNA, 21 nt, synthetic construct
  source 1..21: mol_type = other RNA
cccctgcatcccccagaggcc

SEQ ID NO: 15583 - RNA, 21 nt, synthetic construct
  source 1..21: mol_type = other RNA
cccctgcatcccccttcccct

SEQ ID NO: 15584 - RNA, 21 nt, synthetic construct
  source 1..21: mol_type = other RNA
cccctgcatccccgttcccct

SEQ ID NO: 15585 - RNA, 21 nt, synthetic construct
  source 1..21: mol_type = other RNA
cccctgctgtggctgttccca

SEQ ID NO: 15586 - RNA, 21 nt, synthetic construct
  source 1..21: mol_type = other RNA
cccctgcttcttggccacgta

SEQ ID NO: 15587 - RNA, 21 nt, synthetic construct
  source 1..21: mol_type = other RNA
cccctggacttcggcttttgt

SEQ ID NO: 15588 - RNA, 21 nt, synthetic construct
  source 1..21: mol_type = other RNA
cccctggctctcctgcccctt

SEQ ID NO: 15589 - RNA, 21 nt, synthetic construct
  source 1..21: mol_type = other RNA
cccctggctgcagggccccgt

SEQ ID NO: 15590 - RNA, 21 nt, synthetic construct
  source 1..21: mol_type = other RNA
cccctgggtctgaatggggag

SEQ ID NO: 15591 - RNA, 21 nt, synthetic construct
  source 1..21: mol_type = other RNA
cccctgtagggaaggggcagg

SEQ ID NO: 15592 - RNA, 21 nt, synthetic construct
  source 1..21: mol_type = other RNA
ccccttcacagcccgagtttc

SEQ ID NO: 15593 - RNA, 21 nt, synthetic construct
  source 1..21: mol_type = other RNA
ccccttcccctgcatccccca

SEQ ID NO: 15594 - RNA, 21 nt, synthetic construct
  source 1..21: mol_type = other RNA
ccccttccctacaggggttcc

SEQ ID NO: 15595 - RNA, 21 nt, synthetic construct
  source 1..21: mol_type = other RNA
ccccttcctcgtccaccatct

SEQ ID NO: 15596 - RNA, 21 nt, synthetic construct
  source 1..21: mol_type = other RNA
cccgaagagtgagtttgccaa

SEQ ID NO: 15597 - RNA, 21 nt, synthetic construct
  source 1..21: mol_type = other RNA
cccgagtttccatgacctcat

SEQ ID NO: 15598 - RNA, 21 nt, synthetic construct
  source 1..21: mol_type = other RNA
cccgcacccagatgagaagcc

SEQ ID NO: 15599 - RNA, 21 nt, synthetic construct
  source 1..21: mol_type = other RNA
cccgcccaggcccctgagtct

SEQ ID NO: 15600 - RNA, 21 nt, synthetic construct
  source 1..21: mol_type = other RNA
cccgcctccctaagacccaga

SEQ ID NO: 15601 - RNA, 21 nt, synthetic construct
  source 1..21: mol_type = other RNA
cccgcctcctccagatgggca

SEQ ID NO: 15602 - RNA, 21 nt, synthetic construct
  source 1..21: mol_type = other RNA
cccgcttccctaaggccctgc

SEQ ID NO: 15603 - RNA, 21 nt, synthetic construct
  source 1..21: mol_type = other RNA
cccggagcccacccagtgtcc

SEQ ID NO: 15604 - RNA, 21 nt, synthetic construct
  source 1..21: mol_type = other RNA
cccggccagtttctccacctg

SEQ ID NO: 15605 - RNA, 21 nt, synthetic construct
  source 1..21: mol_type = other RNA
cccggttctcagtggccaccc

SEQ ID NO: 15606 - RNA, 21 nt, synthetic construct
  source 1..21: mol_type = other RNA
cccgtcaccacccacaggtgg

SEQ ID NO: 15607 - RNA, 21 nt, synthetic construct
  source 1..21: mol_type = other RNA
cccgtcctggcagggctgtgg

SEQ ID NO: 15608 - RNA, 21 nt, synthetic construct
  source 1..21: mol_type = other RNA
cccgtgcagagggggcctcag

SEQ ID NO: 15609 - RNA, 21 nt, synthetic construct
  source 1..21: mol_type = other RNA
cccgtggatctaggagtttag

SEQ ID NO: 15610 - RNA, 21 nt, synthetic construct
  source 1..21: mol_type = other RNA
cccgtgtcagcccctggctgc

SEQ ID NO: 15611 - RNA, 21 nt, synthetic construct
  source 1..21: mol_type = other RNA
cccgttcacttcctgtttgca

SEQ ID NO: 15612 - RNA, 21 nt, synthetic construct
  source 1..21: mol_type = other RNA
cccgttcccagggcacgtgcg

SEQ ID NO: 15613 - RNA, 21 nt, synthetic construct
  source 1..21: mol_type = other RNA
cccgttcccctgcatccccct

SEQ ID NO: 15614 - RNA, 21 nt, synthetic construct
  source 1..21: mol_type = other RNA
cccgttcccctgcatccccgt

SEQ ID NO: 15615 - RNA, 21 nt, synthetic construct
  source 1..21: mol_type = other RNA
ccctaagaacttgggaacagc

SEQ ID NO: 15616 - RNA, 21 nt, synthetic construct
  source 1..21: mol_type = other RNA
ccctaagaatcctggctccag

SEQ ID NO: 15617 - RNA, 21 nt, synthetic construct
  source 1..21: mol_type = other RNA
ccctaagacccagaagtccag

SEQ ID NO: 15618 - RNA, 21 nt, synthetic construct
  source 1..21: mol_type = other RNA
ccctaaggccctgctctgggc

SEQ ID NO: 15619 - RNA, 21 nt, synthetic construct
  source 1..21: mol_type = other RNA
ccctaagggaagaatgagaaa

SEQ ID NO: 15620 - RNA, 21 nt, synthetic construct
  source 1..21: mol_type = other RNA
ccctacaggggttcctggctc

SEQ ID NO: 15621 - RNA, 21 nt, synthetic construct
  source 1..21: mol_type = other RNA
ccctagccactaaggcaattg

SEQ ID NO: 15622 - RNA, 21 nt, synthetic construct
  source 1..21: mol_type = other RNA
ccctagtctgagcactggaag

SEQ ID NO: 15623 - RNA, 21 nt, synthetic construct
  source 1..21: mol_type = other RNA
ccctatcgccatgacaactgg

SEQ ID NO: 15624 - RNA, 21 nt, synthetic construct
  source 1..21: mol_type = other RNA
ccctcacctctccaaagctgc

SEQ ID NO: 15625 - RNA, 21 nt, synthetic construct
  source 1..21: mol_type = other RNA
ccctcagacccacgagtccag

SEQ ID NO: 15626 - RNA, 21 nt, synthetic construct
  source 1..21: mol_type = other RNA
ccctcagatgaaggagtccag

SEQ ID NO: 15627 - RNA, 21 nt, synthetic construct
  source 1..21: mol_type = other RNA
ccctcagtcctaggaaaacag

SEQ ID NO: 15628 - RNA, 21 nt, synthetic construct
  source 1..21: mol_type = other RNA
ccctccccattcaacccagga

SEQ ID NO: 15629 - RNA, 21 nt, synthetic construct
  source 1..21: mol_type = other RNA
ccctcccctatcgccatgaca

SEQ ID NO: 15630 - RNA, 21 nt, synthetic construct
  source 1..21: mol_type = other RNA
ccctcccgcctcctccagatg

SEQ ID NO: 15631 - RNA, 21 nt, synthetic construct
  source 1..21: mol_type = other RNA
ccctcccttccccgttcactt

SEQ ID NO: 15632 - RNA, 21 nt, synthetic construct
  source 1..21: mol_type = other RNA
ccctcctactctagcccccaa

SEQ ID NO: 15633 - RNA, 21 nt, synthetic construct
  source 1..21: mol_type = other RNA
ccctcctcaccacagccctgc

SEQ ID NO: 15634 - RNA, 21 nt, synthetic construct
  source 1..21: mol_type = other RNA
ccctcctccgaccccctggac

SEQ ID NO: 15635 - RNA, 21 nt, synthetic construct
  source 1..21: mol_type = other RNA
ccctcctccttcagagccagg

SEQ ID NO: 15636 - RNA, 21 nt, synthetic construct
  source 1..21: mol_type = other RNA
ccctcctctctcaaacccagg

SEQ ID NO: 15637 - RNA, 21 nt, synthetic construct
  source 1..21: mol_type = other RNA
ccctcctctctgaaccccagc

SEQ ID NO: 15638 - RNA, 21 nt, synthetic construct
  source 1..21: mol_type = other RNA
ccctcctgccttaaacccagc

SEQ ID NO: 15639 - RNA, 21 nt, synthetic construct
  source 1..21: mol_type = other RNA
ccctcggacccaggagtccag

SEQ ID NO: 15640 - RNA, 21 nt, synthetic construct
  source 1..21: mol_type = other RNA
ccctcgtagctccctcccgcc

SEQ ID NO: 15641 - RNA, 21 nt, synthetic construct
  source 1..21: mol_type = other RNA
ccctctcccagaacctgagct

SEQ ID NO: 15642 - RNA, 21 nt, synthetic construct
  source 1..21: mol_type = other RNA
ccctctgcacggggccctgca

SEQ ID NO: 15643 - RNA, 21 nt, synthetic construct
  source 1..21: mol_type = other RNA
ccctctggagtcccgacttgc

SEQ ID NO: 15644 - RNA, 21 nt, synthetic construct
  source 1..21: mol_type = other RNA
ccctctgggagtcccgcccag

SEQ ID NO: 15645 - RNA, 21 nt, synthetic construct
  source 1..21: mol_type = other RNA
ccctgagtctgtcccagcaca

SEQ ID NO: 15646 - RNA, 21 nt, synthetic construct
  source 1..21: mol_type = other RNA
ccctgcagccaggggctgaca

SEQ ID NO: 15647 - RNA, 21 nt, synthetic construct
  source 1..21: mol_type = other RNA
ccctgcatagccctgggccca

SEQ ID NO: 15648 - RNA, 21 nt, synthetic construct
  source 1..21: mol_type = other RNA
ccctgcatcccccagaggccc

SEQ ID NO: 15649 - RNA, 21 nt, synthetic construct
  source 1..21: mol_type = other RNA
ccctgcatcccccttcccctg

SEQ ID NO: 15650 - RNA, 21 nt, synthetic construct
  source 1..21: mol_type = other RNA
ccctgcatccccgttcccctg

SEQ ID NO: 15651 - RNA, 21 nt, synthetic construct
  source 1..21: mol_type = other RNA
ccctgccaggacggggctggc

SEQ ID NO: 15652 - RNA, 21 nt, synthetic construct
  source 1..21: mol_type = other RNA
ccctgcccccattcctgcacc

SEQ ID NO: 15653 - RNA, 21 nt, synthetic construct
  source 1..21: mol_type = other RNA
ccctgcgctaccctctcccag

SEQ ID NO: 15654 - RNA, 21 nt, synthetic construct
  source 1..21: mol_type = other RNA
ccctgctctgggcggaggaat

SEQ ID NO: 15655 - RNA, 21 nt, synthetic construct
  source 1..21: mol_type = other RNA
ccctgctctgggcttctgggt

SEQ ID NO: 15656 - RNA, 21 nt, synthetic construct
  source 1..21: mol_type = other RNA
ccctgctgtggctgttcccaa

SEQ ID NO: 15657 - RNA, 21 nt, synthetic construct
  source 1..21: mol_type = other RNA
ccctgcttcttggccacgtaa

SEQ ID NO: 15658 - RNA, 21 nt, synthetic construct
  source 1..21: mol_type = other RNA
ccctggacttcggcttttgtc

SEQ ID NO: 15659 - RNA, 21 nt, synthetic construct
  source 1..21: mol_type = other RNA
ccctggatctgttttcgtggc

SEQ ID NO: 15660 - RNA, 21 nt, synthetic construct
  source 1..21: mol_type = other RNA
ccctggctctcctgccccttc

SEQ ID NO: 15661 - RNA, 21 nt, synthetic construct
  source 1..21: mol_type = other RNA
ccctggctgcagggccccgtg

SEQ ID NO: 15662 - RNA, 21 nt, synthetic construct
  source 1..21: mol_type = other RNA
ccctgggaacgggatgaactc

SEQ ID NO: 15663 - RNA, 21 nt, synthetic construct
  source 1..21: mol_type = other RNA
ccctgggcccacggcttcgtt

SEQ ID NO: 15664 - RNA, 21 nt, synthetic construct
  source 1..21: mol_type = other RNA
ccctgggtctgaatggggaga

SEQ ID NO: 15665 - RNA, 21 nt, synthetic construct
  source 1..21: mol_type = other RNA
ccctggtgcccaggcctcagg

SEQ ID NO: 15666 - RNA, 21 nt, synthetic construct
  source 1..21: mol_type = other RNA
ccctgtagggaaggggcagga

SEQ ID NO: 15667 - RNA, 21 nt, synthetic construct
  source 1..21: mol_type = other RNA
ccctgtcccccttcctcgtcc

SEQ ID NO: 15668 - RNA, 21 nt, synthetic construct
  source 1..21: mol_type = other RNA
ccctgtctaccaggctgcctt

SEQ ID NO: 15669 - RNA, 21 nt, synthetic construct
  source 1..21: mol_type = other RNA
ccctgtgaaagatgcctgagg

SEQ ID NO: 15670 - RNA, 21 nt, synthetic construct
  source 1..21: mol_type = other RNA
ccctgtgctgggacagactca

SEQ ID NO: 15671 - RNA, 21 nt, synthetic construct
  source 1..21: mol_type = other RNA
ccctgttttcctaggactgag

SEQ ID NO: 15672 - RNA, 21 nt, synthetic construct
  source 1..21: mol_type = other RNA
cccttaggggtccaaaacttg

SEQ ID NO: 15673 - RNA, 21 nt, synthetic construct
  source 1..21: mol_type = other RNA
cccttcacagcccgagtttcc

SEQ ID NO: 15674 - RNA, 21 nt, synthetic construct
  source 1..21: mol_type = other RNA
cccttccccgttcacttcctg

SEQ ID NO: 15675 - RNA, 21 nt, synthetic construct
  source 1..21: mol_type = other RNA
cccttcccctgcatcccccag

SEQ ID NO: 15676 - RNA, 21 nt, synthetic construct
  source 1..21: mol_type = other RNA
cccttccctacaggggttcct

SEQ ID NO: 15677 - RNA, 21 nt, synthetic construct
  source 1..21: mol_type = other RNA
cccttccgccctcagatgaag

SEQ ID NO: 15678 - RNA, 21 nt, synthetic construct
  source 1..21: mol_type = other RNA
cccttcctcgtccaccatctc

SEQ ID NO: 15679 - RNA, 21 nt, synthetic construct
  source 1..21: mol_type = other RNA
cccttctcaggttacgtggcc

SEQ ID NO: 15680 - RNA, 21 nt, synthetic construct
  source 1..21: mol_type = other RNA
cccttggaaggacctggctgg

SEQ ID NO: 15681 - RNA, 21 nt, synthetic construct
  source 1..21: mol_type = other RNA
ccctttcaaggacctgcccag

SEQ ID NO: 15682 - RNA, 21 nt, synthetic construct
  source 1..21: mol_type = other RNA
ccctttctctttctccatcct

SEQ ID NO: 15683 - RNA, 21 nt, synthetic construct
  source 1..21: mol_type = other RNA
ccctttgtgagaatggtgcgt

SEQ ID NO: 15684 - RNA, 21 nt, synthetic construct
  source 1..21: mol_type = other RNA
ccgaagagtgagtttgccaag

SEQ ID NO: 15685 - RNA, 21 nt, synthetic construct
  source 1..21: mol_type = other RNA
ccgaagtccagggggtcggag

SEQ ID NO: 15686 - RNA, 21 nt, synthetic construct
  source 1..21: mol_type = other RNA
ccgaccccctggacttcggct

SEQ ID NO: 15687 - RNA, 21 nt, synthetic construct
  source 1..21: mol_type = other RNA
ccgagcttgacccttggaagg

SEQ ID NO: 15688 - RNA, 21 nt, synthetic construct
  source 1..21: mol_type = other RNA
ccgagttcatcccgttcccag

SEQ ID NO: 15689 - RNA, 21 nt, synthetic construct
  source 1..21: mol_type = other RNA
ccgagtttccatgacctcatg

SEQ ID NO: 15690 - RNA, 21 nt, synthetic construct
  source 1..21: mol_type = other RNA
ccgcacccagatgagaagccc

SEQ ID NO: 15691 - RNA, 21 nt, synthetic construct
  source 1..21: mol_type = other RNA
ccgcacgtgccctgggaacgg

SEQ ID NO: 15692 - RNA, 21 nt, synthetic construct
  source 1..21: mol_type = other RNA
ccgcccagagcagggtcccgc

SEQ ID NO: 15693 - RNA, 21 nt, synthetic construct
  source 1..21: mol_type = other RNA
ccgcccaggcccctgagtctg

SEQ ID NO: 15694 - RNA, 21 nt, synthetic construct
  source 1..21: mol_type = other RNA
ccgccctcagatgaaggagtc

SEQ ID NO: 15695 - RNA, 21 nt, synthetic construct
  source 1..21: mol_type = other RNA
ccgcctccctaagacccagaa

SEQ ID NO: 15696 - RNA, 21 nt, synthetic construct
  source 1..21: mol_type = other RNA
ccgcctcctccagatgggcag

SEQ ID NO: 15697 - RNA, 21 nt, synthetic construct
  source 1..21: mol_type = other RNA
ccgcctctactccctttctct

SEQ ID NO: 15698 - RNA, 21 nt, synthetic construct
  source 1..21: mol_type = other RNA
ccgcgtcagagcagctcaggt

SEQ ID NO: 15699 - RNA, 21 nt, synthetic construct
  source 1..21: mol_type = other RNA
ccgcttccctaaggccctgct

SEQ ID NO: 15700 - RNA, 21 nt, synthetic construct
  source 1..21: mol_type = other RNA
ccggagcccacccagtgtcca

SEQ ID NO: 15701 - RNA, 21 nt, synthetic construct
  source 1..21: mol_type = other RNA
ccggccaggccttcagtgctc

SEQ ID NO: 15702 - RNA, 21 nt, synthetic construct
  source 1..21: mol_type = other RNA
ccggccagtttctccacctgg

SEQ ID NO: 15703 - RNA, 21 nt, synthetic construct
  source 1..21: mol_type = other RNA
ccggcctgaccactgggcaac

SEQ ID NO: 15704 - RNA, 21 nt, synthetic construct
  source 1..21: mol_type = other RNA
ccgggaatcaagagtcaccca

SEQ ID NO: 15705 - RNA, 21 nt, synthetic construct
  source 1..21: mol_type = other RNA
ccgggacctgaactggagctg

SEQ ID NO: 15706 - RNA, 21 nt, synthetic construct
  source 1..21: mol_type = other RNA
ccggttctcagtggccaccct

SEQ ID NO: 15707 - RNA, 21 nt, synthetic construct
  source 1..21: mol_type = other RNA
ccgtcaccacccacaggtggc

SEQ ID NO: 15708 - RNA, 21 nt, synthetic construct
  source 1..21: mol_type = other RNA
ccgtcctggcagggctgtggt

SEQ ID NO: 15709 - RNA, 21 nt, synthetic construct
  source 1..21: mol_type = other RNA
ccgtctggtgcgtttcactga

SEQ ID NO: 15710 - RNA, 21 nt, synthetic construct
  source 1..21: mol_type = other RNA
ccgtgcagagggggcctcagt

SEQ ID NO: 15711 - RNA, 21 nt, synthetic construct
  source 1..21: mol_type = other RNA
ccgtgcgtcagttttacctgt

SEQ ID NO: 15712 - RNA, 21 nt, synthetic construct
  source 1..21: mol_type = other RNA
ccgtggatctaggagtttagc

SEQ ID NO: 15713 - RNA, 21 nt, synthetic construct
  source 1..21: mol_type = other RNA
ccgtgggcccagggctatgca

SEQ ID NO: 15714 - RNA, 21 nt, synthetic construct
  source 1..21: mol_type = other RNA
ccgtgtcagcccctggctgca

SEQ ID NO: 15715 - RNA, 21 nt, synthetic construct
  source 1..21: mol_type = other RNA
ccgtgtccctggatctgtttt

SEQ ID NO: 15716 - RNA, 21 nt, synthetic construct
  source 1..21: mol_type = other RNA
ccgtgtctaacaggtaccatg

SEQ ID NO: 15717 - RNA, 21 nt, synthetic construct
  source 1..21: mol_type = other RNA
ccgtgtggaaaactccctttg

SEQ ID NO: 15718 - RNA, 21 nt, synthetic construct
  source 1..21: mol_type = other RNA
ccgttcacttcctgtttgcag

SEQ ID NO: 15719 - RNA, 21 nt, synthetic construct
  source 1..21: mol_type = other RNA
ccgttcccagggcacgtgcgg

SEQ ID NO: 15720 - RNA, 21 nt, synthetic construct
  source 1..21: mol_type = other RNA
ccgttcccctgcatccccctt

SEQ ID NO: 15721 - RNA, 21 nt, synthetic construct
  source 1..21: mol_type = other RNA
ccgttcccctgcatccccgtt

SEQ ID NO: 15722 - RNA, 21 nt, synthetic construct
  source 1..21: mol_type = other RNA
ccgtttctcattcttccctta

SEQ ID NO: 15723 - RNA, 21 nt, synthetic construct
  source 1..21: mol_type = other RNA
cctaagaacttgggaacagcc

SEQ ID NO: 15724 - RNA, 21 nt, synthetic construct
  source 1..21: mol_type = other RNA
cctaagaatcctggctccagc

SEQ ID NO: 15725 - RNA, 21 nt, synthetic construct
  source 1..21: mol_type = other RNA
cctaagacccagaagtccagg

SEQ ID NO: 15726 - RNA, 21 nt, synthetic construct
  source 1..21: mol_type = other RNA
cctaaggccctgctctgggct

SEQ ID NO: 15727 - RNA, 21 nt, synthetic construct
  source 1..21: mol_type = other RNA
cctaagggaagaatgagaaac

SEQ ID NO: 15728 - RNA, 21 nt, synthetic construct
  source 1..21: mol_type = other RNA
cctacaggggttcctggctct

SEQ ID NO: 15729 - RNA, 21 nt, synthetic construct
  source 1..21: mol_type = other RNA
cctactctagcccccaacccc

SEQ ID NO: 15730 - RNA, 21 nt, synthetic construct
  source 1..21: mol_type = other RNA
cctacttggcctggaccccac

SEQ ID NO: 15731 - RNA, 21 nt, synthetic construct
  source 1..21: mol_type = other RNA
cctagatccacgggataaatt

SEQ ID NO: 15732 - RNA, 21 nt, synthetic construct
  source 1..21: mol_type = other RNA
cctagcaccgtgtccctggat

SEQ ID NO: 15733 - RNA, 21 nt, synthetic construct
  source 1..21: mol_type = other RNA
cctagccactaaggcaattgg

SEQ ID NO: 15734 - RNA, 21 nt, synthetic construct
  source 1..21: mol_type = other RNA
cctaggaaaacagggatggtt

SEQ ID NO: 15735 - RNA, 21 nt, synthetic construct
  source 1..21: mol_type = other RNA
cctaggacgcaccattctcac

SEQ ID NO: 15736 - RNA, 21 nt, synthetic construct
  source 1..21: mol_type = other RNA
cctaggactgagggtttcagt

SEQ ID NO: 15737 - RNA, 21 nt, synthetic construct
  source 1..21: mol_type = other RNA
cctaggtgttcaccaggtcgt

SEQ ID NO: 15738 - RNA, 21 nt, synthetic construct
  source 1..21: mol_type = other RNA
cctagtctgagcactggaagc

SEQ ID NO: 15739 - RNA, 21 nt, synthetic construct
  source 1..21: mol_type = other RNA
cctagttttagcactgaaacc

SEQ ID NO: 15740 - RNA, 21 nt, synthetic construct
  source 1..21: mol_type = other RNA
cctatcgccatgacaactggg

SEQ ID NO: 15741 - RNA, 21 nt, synthetic construct
  source 1..21: mol_type = other RNA
cctcaccaagtggttgataaa

SEQ ID NO: 15742 - RNA, 21 nt, synthetic construct
  source 1..21: mol_type = other RNA
cctcaccacagccctgccagg

SEQ ID NO: 15743 - RNA, 21 nt, synthetic construct
  source 1..21: mol_type = other RNA
cctcacctctccaaagctgcc

SEQ ID NO: 15744 - RNA, 21 nt, synthetic construct
  source 1..21: mol_type = other RNA
cctcagacccacgagtccagg

SEQ ID NO: 15745 - RNA, 21 nt, synthetic construct
  source 1..21: mol_type = other RNA
cctcagatgaaggagtccagg

SEQ ID NO: 15746 - RNA, 21 nt, synthetic construct
  source 1..21: mol_type = other RNA
cctcagctccagttcaggtcc

SEQ ID NO: 15747 - RNA, 21 nt, synthetic construct
  source 1..21: mol_type = other RNA
cctcaggcatctttcacaggg

SEQ ID NO: 15748 - RNA, 21 nt, synthetic construct
  source 1..21: mol_type = other RNA
cctcagtcctaggaaaacagg

SEQ ID NO: 15749 - RNA, 21 nt, synthetic construct
  source 1..21: mol_type = other RNA
cctcagtgaactggagtgtga

SEQ ID NO: 15750 - RNA, 21 nt, synthetic construct
  source 1..21: mol_type = other RNA
cctcatgctcttggccctcgt

SEQ ID NO: 15751 - RNA, 21 nt, synthetic construct
  source 1..21: mol_type = other RNA
cctccaactgtggggtgactg

SEQ ID NO: 15752 - RNA, 21 nt, synthetic construct
  source 1..21: mol_type = other RNA
cctccaccctgcatagccctg

SEQ ID NO: 15753 - RNA, 21 nt, synthetic construct
  source 1..21: mol_type = other RNA
cctccagatgggcagctttgg

SEQ ID NO: 15754 - RNA, 21 nt, synthetic construct
  source 1..21: mol_type = other RNA
cctccccattcaacccaggag

SEQ ID NO: 15755 - RNA, 21 nt, synthetic construct
  source 1..21: mol_type = other RNA
cctcccctatcgccatgacaa

SEQ ID NO: 15756 - RNA, 21 nt, synthetic construct
  source 1..21: mol_type = other RNA
cctcccgcctcctccagatgg

SEQ ID NO: 15757 - RNA, 21 nt, synthetic construct
  source 1..21: mol_type = other RNA
cctccctaagacccagaagtc

SEQ ID NO: 15758 - RNA, 21 nt, synthetic construct
  source 1..21: mol_type = other RNA
cctcccttccccgttcacttc

SEQ ID NO: 15759 - RNA, 21 nt, synthetic construct
  source 1..21: mol_type = other RNA
cctccgaccccctggacttcg

SEQ ID NO: 15760 - RNA, 21 nt, synthetic construct
  source 1..21: mol_type = other RNA
cctccgcccagagcagggtcc

SEQ ID NO: 15761 - RNA, 21 nt, synthetic construct
  source 1..21: mol_type = other RNA
cctccgtgcgtcagttttacc

SEQ ID NO: 15762 - RNA, 21 nt, synthetic construct
  source 1..21: mol_type = other RNA
cctcctactctagcccccaac

SEQ ID NO: 15763 - RNA, 21 nt, synthetic construct
  source 1..21: mol_type = other RNA
cctcctcaccacagccctgcc

SEQ ID NO: 15764 - RNA, 21 nt, synthetic construct
  source 1..21: mol_type = other RNA
cctcctccagatgggcagctt

SEQ ID NO: 15765 - RNA, 21 nt, synthetic construct
  source 1..21: mol_type = other RNA
cctcctccgaccccctggact

SEQ ID NO: 15766 - RNA, 21 nt, synthetic construct
  source 1..21: mol_type = other RNA
cctcctccttcagagccagga

SEQ ID NO: 15767 - RNA, 21 nt, synthetic construct
  source 1..21: mol_type = other RNA
cctcctctctcaaacccagga

SEQ ID NO: 15768 - RNA, 21 nt, synthetic construct
  source 1..21: mol_type = other RNA
cctcctctctgaaccccagcc

SEQ ID NO: 15769 - RNA, 21 nt, synthetic construct
  source 1..21: mol_type = other RNA
cctcctgccttaaacccagcc

SEQ ID NO: 15770 - RNA, 21 nt, synthetic construct
  source 1..21: mol_type = other RNA
cctcctgggataccccgaaga

SEQ ID NO: 15771 - RNA, 21 nt, synthetic construct
  source 1..21: mol_type = other RNA
cctcctgggttgaatggggag

SEQ ID NO: 15772 - RNA, 21 nt, synthetic construct
  source 1..21: mol_type = other RNA
cctccttcagagccaggagtc

SEQ ID NO: 15773 - RNA, 21 nt, synthetic construct
  source 1..21: mol_type = other RNA
cctcggacccaggagtccagg

SEQ ID NO: 15774 - RNA, 21 nt, synthetic construct
  source 1..21: mol_type = other RNA
cctcgtagctccctcccgcct

SEQ ID NO: 15775 - RNA, 21 nt, synthetic construct
  source 1..21: mol_type = other RNA
cctcgtccaccatctcatgcc

SEQ ID NO: 15776 - RNA, 21 nt, synthetic construct
  source 1..21: mol_type = other RNA
cctctactccctttctctttc

SEQ ID NO: 15777 - RNA, 21 nt, synthetic construct
  source 1..21: mol_type = other RNA
cctctccaaagctgcccatct

SEQ ID NO: 15778 - RNA, 21 nt, synthetic construct
  source 1..21: mol_type = other RNA
cctctcccagaacctgagctg

SEQ ID NO: 15779 - RNA, 21 nt, synthetic construct
  source 1..21: mol_type = other RNA
cctctccccattcagacccag

SEQ ID NO: 15780 - RNA, 21 nt, synthetic construct
  source 1..21: mol_type = other RNA
cctctcctgggcttgccaagg

SEQ ID NO: 15781 - RNA, 21 nt, synthetic construct
  source 1..21: mol_type = other RNA
cctctcgtggggtccaggcca

SEQ ID NO: 15782 - RNA, 21 nt, synthetic construct
  source 1..21: mol_type = other RNA
cctctctcaaacccaggagcc

SEQ ID NO: 15783 - RNA, 21 nt, synthetic construct
  source 1..21: mol_type = other RNA
cctctctgaaccccagcccac

SEQ ID NO: 15784 - RNA, 21 nt, synthetic construct
  source 1..21: mol_type = other RNA
cctctgcacggggccctgcag

SEQ ID NO: 15785 - RNA, 21 nt, synthetic construct
  source 1..21: mol_type = other RNA
cctctggagtcccgacttgct

SEQ ID NO: 15786 - RNA, 21 nt, synthetic construct
  source 1..21: mol_type = other RNA
cctctggccactggctgttta

SEQ ID NO: 15787 - RNA, 21 nt, synthetic construct
  source 1..21: mol_type = other RNA
cctctgggagtcccgcccagg

SEQ ID NO: 15788 - RNA, 21 nt, synthetic construct
  source 1..21: mol_type = other RNA
cctctgggggatgcaggggaa

SEQ ID NO: 15789 - RNA, 21 nt, synthetic construct
  source 1..21: mol_type = other RNA
cctcttccctagtctgagcac

SEQ ID NO: 15790 - RNA, 21 nt, synthetic construct
  source 1..21: mol_type = other RNA
cctcttgggaagtgtaaggaa

SEQ ID NO: 15791 - RNA, 21 nt, synthetic construct
  source 1..21: mol_type = other RNA
cctgaactggagctgaggaag

SEQ ID NO: 15792 - RNA, 21 nt, synthetic construct
  source 1..21: mol_type = other RNA
cctgaccactgggcaaccagg

SEQ ID NO: 15793 - RNA, 21 nt, synthetic construct
  source 1..21: mol_type = other RNA
cctgacccaaacccagctccc

SEQ ID NO: 15794 - RNA, 21 nt, synthetic construct
  source 1..21: mol_type = other RNA
cctgagaagggaatccctcct

SEQ ID NO: 15795 - RNA, 21 nt, synthetic construct
  source 1..21: mol_type = other RNA
cctgagcgcctctcctgggct

SEQ ID NO: 15796 - RNA, 21 nt, synthetic construct
  source 1..21: mol_type = other RNA
cctgagctgctctgacgcggc

SEQ ID NO: 15797 - RNA, 21 nt, synthetic construct
  source 1..21: mol_type = other RNA
cctgaggcctgggcaccaggg

SEQ ID NO: 15798 - RNA, 21 nt, synthetic construct
  source 1..21: mol_type = other RNA
cctgagtctgtcccagcacag

SEQ ID NO: 15799 - RNA, 21 nt, synthetic construct
  source 1..21: mol_type = other RNA
cctgagttctaactttggctc

SEQ ID NO: 15800 - RNA, 21 nt, synthetic construct
  source 1..21: mol_type = other RNA
cctgcaccccaattgccttag

SEQ ID NO: 15801 - RNA, 21 nt, synthetic construct
  source 1..21: mol_type = other RNA
cctgcagagtatctgctgggg

SEQ ID NO: 15802 - RNA, 21 nt, synthetic construct
  source 1..21: mol_type = other RNA
cctgcagccaggggctgacac

SEQ ID NO: 15803 - RNA, 21 nt, synthetic construct
  source 1..21: mol_type = other RNA
cctgcatagccctgggcccac

SEQ ID NO: 15804 - RNA, 21 nt, synthetic construct
  source 1..21: mol_type = other RNA
cctgcatcccccagaggcccc

SEQ ID NO: 15805 - RNA, 21 nt, synthetic construct
  source 1..21: mol_type = other RNA
cctgcatcccccttcccctgc

SEQ ID NO: 15806 - RNA, 21 nt, synthetic construct
  source 1..21: mol_type = other RNA
cctgcatccccgttcccctgc

SEQ ID NO: 15807 - RNA, 21 nt, synthetic construct
  source 1..21: mol_type = other RNA
cctgcatccttctccaggcag

SEQ ID NO: 15808 - RNA, 21 nt, synthetic construct
  source 1..21: mol_type = other RNA
cctgccaggacggggctggct

SEQ ID NO: 15809 - RNA, 21 nt, synthetic construct
  source 1..21: mol_type = other RNA
cctgcccagtacaggcatccc

SEQ ID NO: 15810 - RNA, 21 nt, synthetic construct
  source 1..21: mol_type = other RNA
cctgcccccattcctgcaccc

SEQ ID NO: 15811 - RNA, 21 nt, synthetic construct
  source 1..21: mol_type = other RNA
cctgccccttccctacagggg

SEQ ID NO: 15812 - RNA, 21 nt, synthetic construct
  source 1..21: mol_type = other RNA
cctgcccggttctcagtggcc

SEQ ID NO: 15813 - RNA, 21 nt, synthetic construct
  source 1..21: mol_type = other RNA
cctgcctggagaaggatgcag

SEQ ID NO: 15814 - RNA, 21 nt, synthetic construct
  source 1..21: mol_type = other RNA
cctgccttaaacccagccagg

SEQ ID NO: 15815 - RNA, 21 nt, synthetic construct
  source 1..21: mol_type = other RNA
cctgcgctaccctctcccaga

SEQ ID NO: 15816 - RNA, 21 nt, synthetic construct
  source 1..21: mol_type = other RNA
cctgctctgggcggaggaata

SEQ ID NO: 15817 - RNA, 21 nt, synthetic construct
  source 1..21: mol_type = other RNA
cctgctctgggcttctgggtt

SEQ ID NO: 15818 - RNA, 21 nt, synthetic construct
  source 1..21: mol_type = other RNA
cctgctgtggctgttcccaag

SEQ ID NO: 15819 - RNA, 21 nt, synthetic construct
  source 1..21: mol_type = other RNA
cctgcttcttggccacgtaac

SEQ ID NO: 15820 - RNA, 21 nt, synthetic construct
  source 1..21: mol_type = other RNA
cctggaccccacgagaggcca

SEQ ID NO: 15821 - RNA, 21 nt, synthetic construct
  source 1..21: mol_type = other RNA
cctggacccctgggtctgaat

SEQ ID NO: 15822 - RNA, 21 nt, synthetic construct
  source 1..21: mol_type = other RNA
cctggactccttcatctgagg

SEQ ID NO: 15823 - RNA, 21 nt, synthetic construct
  source 1..21: mol_type = other RNA
cctggactctggagtccctgg

SEQ ID NO: 15824 - RNA, 21 nt, synthetic construct
  source 1..21: mol_type = other RNA
cctggacttcggcttttgtcc

SEQ ID NO: 15825 - RNA, 21 nt, synthetic construct
  source 1..21: mol_type = other RNA
cctggacttctgggtcttagg

SEQ ID NO: 15826 - RNA, 21 nt, synthetic construct
  source 1..21: mol_type = other RNA
cctggagaaggatgcaggacg

SEQ ID NO: 15827 - RNA, 21 nt, synthetic construct
  source 1..21: mol_type = other RNA
cctggagcattggggtgggct

SEQ ID NO: 15828 - RNA, 21 nt, synthetic construct
  source 1..21: mol_type = other RNA
cctggatctgttttcgtggct

SEQ ID NO: 15829 - RNA, 21 nt, synthetic construct
  source 1..21: mol_type = other RNA
cctggcagggctgtggtgagg

SEQ ID NO: 15830 - RNA, 21 nt, synthetic construct
  source 1..21: mol_type = other RNA
cctggcccccagcccctcctg

SEQ ID NO: 15831 - RNA, 21 nt, synthetic construct
  source 1..21: mol_type = other RNA
cctggccggcctgaccactgg

SEQ ID NO: 15832 - RNA, 21 nt, synthetic construct
  source 1..21: mol_type = other RNA
cctggcctcctgggttgaatg

SEQ ID NO: 15833 - RNA, 21 nt, synthetic construct
  source 1..21: mol_type = other RNA
cctggctatctgcaaacagga

SEQ ID NO: 15834 - RNA, 21 nt, synthetic construct
  source 1..21: mol_type = other RNA
cctggctccagcccctcctac

SEQ ID NO: 15835 - RNA, 21 nt, synthetic construct
  source 1..21: mol_type = other RNA
cctggctctcctgccccttcc

SEQ ID NO: 15836 - RNA, 21 nt, synthetic construct
  source 1..21: mol_type = other RNA
cctggctctgaaggaggaggg

SEQ ID NO: 15837 - RNA, 21 nt, synthetic construct
  source 1..21: mol_type = other RNA
cctggctctgctcttcagact

SEQ ID NO: 15838 - RNA, 21 nt, synthetic construct
  source 1..21: mol_type = other RNA
cctggctgcagggccccgtgc

SEQ ID NO: 15839 - RNA, 21 nt, synthetic construct
  source 1..21: mol_type = other RNA
cctggctgggtttaaggcagg

SEQ ID NO: 15840 - RNA, 21 nt, synthetic construct
  source 1..21: mol_type = other RNA
cctgggaacgggatgaactcg

SEQ ID NO: 15841 - RNA, 21 nt, synthetic construct
  source 1..21: mol_type = other RNA
cctgggataccccgaagagtg

SEQ ID NO: 15842 - RNA, 21 nt, synthetic construct
  source 1..21: mol_type = other RNA
cctgggcaaacagcataagct

SEQ ID NO: 15843 - RNA, 21 nt, synthetic construct
  source 1..21: mol_type = other RNA
cctgggcaccagggactccag

SEQ ID NO: 15844 - RNA, 21 nt, synthetic construct
  source 1..21: mol_type = other RNA
cctgggcccacggcttcgttc

SEQ ID NO: 15845 - RNA, 21 nt, synthetic construct
  source 1..21: mol_type = other RNA
cctgggccccaggctgtcaca

SEQ ID NO: 15846 - RNA, 21 nt, synthetic construct
  source 1..21: mol_type = other RNA
cctgggcgggactcccagagg

SEQ ID NO: 15847 - RNA, 21 nt, synthetic construct
  source 1..21: mol_type = other RNA
cctgggctcctgggtttgaga

SEQ ID NO: 15848 - RNA, 21 nt, synthetic construct
  source 1..21: mol_type = other RNA
cctgggcttgccaaggactca

SEQ ID NO: 15849 - RNA, 21 nt, synthetic construct
  source 1..21: mol_type = other RNA
cctggggcaagtccctcctcc

SEQ ID NO: 15850 - RNA, 21 nt, synthetic construct
  source 1..21: mol_type = other RNA
cctggggcccaggcacacagg

SEQ ID NO: 15851 - RNA, 21 nt, synthetic construct
  source 1..21: mol_type = other RNA
cctggggcctctgggggatgc

SEQ ID NO: 15852 - RNA, 21 nt, synthetic construct
  source 1..21: mol_type = other RNA
cctggggctgtgtttctcgtc

SEQ ID NO: 15853 - RNA, 21 nt, synthetic construct
  source 1..21: mol_type = other RNA
cctgggtctgaatggggagag

SEQ ID NO: 15854 - RNA, 21 nt, synthetic construct
  source 1..21: mol_type = other RNA
cctgggtctgagggtggaggg

SEQ ID NO: 15855 - RNA, 21 nt, synthetic construct
  source 1..21: mol_type = other RNA
cctgggttgaatggggagggg

SEQ ID NO: 15856 - RNA, 21 nt, synthetic construct
  source 1..21: mol_type = other RNA
cctgggtttgagagaggaggg

SEQ ID NO: 15857 - RNA, 21 nt, synthetic construct
  source 1..21: mol_type = other RNA
cctggtagacagggctggggt

SEQ ID NO: 15858 - RNA, 21 nt, synthetic construct
  source 1..21: mol_type = other RNA
cctggtgaacacctaggacgc

SEQ ID NO: 15859 - RNA, 21 nt, synthetic construct
  source 1..21: mol_type = other RNA
cctggtgcccaggcctcaggc

SEQ ID NO: 15860 - RNA, 21 nt, synthetic construct
  source 1..21: mol_type = other RNA
cctggtgctgcagcttcctta

SEQ ID NO: 15861 - RNA, 21 nt, synthetic construct
  source 1..21: mol_type = other RNA
cctggttgcccagtggtcagg

SEQ ID NO: 15862 - RNA, 21 nt, synthetic construct
  source 1..21: mol_type = other RNA
cctgtactgggcaggtccttg

SEQ ID NO: 15863 - RNA, 21 nt, synthetic construct
  source 1..21: mol_type = other RNA
cctgtagggaaggggcaggag

SEQ ID NO: 15864 - RNA, 21 nt, synthetic construct
  source 1..21: mol_type = other RNA
cctgtcccccttcctcgtcca

SEQ ID NO: 15865 - RNA, 21 nt, synthetic construct
  source 1..21: mol_type = other RNA
cctgtctaccaggctgccttt

SEQ ID NO: 15866 - RNA, 21 nt, synthetic construct
  source 1..21: mol_type = other RNA
cctgtgaaagatgcctgaggc

SEQ ID NO: 15867 - RNA, 21 nt, synthetic construct
  source 1..21: mol_type = other RNA
cctgtgagataaggccagtag

SEQ ID NO: 15868 - RNA, 21 nt, synthetic construct
  source 1..21: mol_type = other RNA
cctgtgctgggacagactcag

SEQ ID NO: 15869 - RNA, 21 nt, synthetic construct
  source 1..21: mol_type = other RNA
cctgtgggtggtgacgggggt

SEQ ID NO: 15870 - RNA, 21 nt, synthetic construct
  source 1..21: mol_type = other RNA
cctgtgtgcctgggccccagg

SEQ ID NO: 15871 - RNA, 21 nt, synthetic construct
  source 1..21: mol_type = other RNA
cctgttagacacggcaaaacc

SEQ ID NO: 15872 - RNA, 21 nt, synthetic construct
  source 1..21: mol_type = other RNA
cctgtttgcagatagccagga

SEQ ID NO: 15873 - RNA, 21 nt, synthetic construct
  source 1..21: mol_type = other RNA
cctgttttcctaggactgagg

SEQ ID NO: 15874 - RNA, 21 nt, synthetic construct
  source 1..21: mol_type = other RNA
ccttaaacccagccaggtcct

SEQ ID NO: 15875 - RNA, 21 nt, synthetic construct
  source 1..21: mol_type = other RNA
ccttaaagagtccccagtgct

SEQ ID NO: 15876 - RNA, 21 nt, synthetic construct
  source 1..21: mol_type = other RNA
ccttacacttcccaagaggag

SEQ ID NO: 15877 - RNA, 21 nt, synthetic construct
  source 1..21: mol_type = other RNA
ccttagggaagcgggaccctg

SEQ ID NO: 15878 - RNA, 21 nt, synthetic construct
  source 1..21: mol_type = other RNA
ccttaggggtccaaaacttgg

SEQ ID NO: 15879 - RNA, 21 nt, synthetic construct
  source 1..21: mol_type = other RNA
ccttagtggctagggggttgg

SEQ ID NO: 15880 - RNA, 21 nt, synthetic construct
  source 1..21: mol_type = other RNA
ccttatctcacaggtaaaact

SEQ ID NO: 15881 - RNA, 21 nt, synthetic construct
  source 1..21: mol_type = other RNA
ccttcacagcccgagtttcca

SEQ ID NO: 15882 - RNA, 21 nt, synthetic construct
  source 1..21: mol_type = other RNA
ccttcagagccaggagtcctg

SEQ ID NO: 15883 - RNA, 21 nt, synthetic construct
  source 1..21: mol_type = other RNA
ccttcagtgctcagtggaaac

SEQ ID NO: 15884 - RNA, 21 nt, synthetic construct
  source 1..21: mol_type = other RNA
ccttcatctgagggcggaagg

SEQ ID NO: 15885 - RNA, 21 nt, synthetic construct
  source 1..21: mol_type = other RNA
ccttccaagggtcaagctcgg

SEQ ID NO: 15886 - RNA, 21 nt, synthetic construct
  source 1..21: mol_type = other RNA
ccttccccgttcacttcctgt

SEQ ID NO: 15887 - RNA, 21 nt, synthetic construct
  source 1..21: mol_type = other RNA
ccttcccctgcatcccccaga

SEQ ID NO: 15888 - RNA, 21 nt, synthetic construct
  source 1..21: mol_type = other RNA
ccttccctacaggggttcctg

SEQ ID NO: 15889 - RNA, 21 nt, synthetic construct
  source 1..21: mol_type = other RNA
ccttccgccctcagatgaagg

SEQ ID NO: 15890 - RNA, 21 nt, synthetic construct
  source 1..21: mol_type = other RNA
ccttcctcagctccagttcag

SEQ ID NO: 15891 - RNA, 21 nt, synthetic construct
  source 1..21: mol_type = other RNA
ccttcctccaccctgcatagc

SEQ ID NO: 15892 - RNA, 21 nt, synthetic construct
  source 1..21: mol_type = other RNA
ccttcctcgtccaccatctca

SEQ ID NO: 15893 - RNA, 21 nt, synthetic construct
  source 1..21: mol_type = other RNA
ccttctcaggttacgtggcca

SEQ ID NO: 15894 - RNA, 21 nt, synthetic construct
  source 1..21: mol_type = other RNA
ccttctccaggcaggtcccca

SEQ ID NO: 15895 - RNA, 21 nt, synthetic construct
  source 1..21: mol_type = other RNA
ccttctttccttaaagagtcc

SEQ ID NO: 15896 - RNA, 21 nt, synthetic construct
  source 1..21: mol_type = other RNA
ccttgaaagggaaaggcccat

SEQ ID NO: 15897 - RNA, 21 nt, synthetic construct
  source 1..21: mol_type = other RNA
ccttgcccccctcccctatcg

SEQ ID NO: 15898 - RNA, 21 nt, synthetic construct
  source 1..21: mol_type = other RNA
ccttggaaggacctggctggg

SEQ ID NO: 15899 - RNA, 21 nt, synthetic construct
  source 1..21: mol_type = other RNA
ccttggcaagcccaggagagg

SEQ ID NO: 15900 - RNA, 21 nt, synthetic construct
  source 1..21: mol_type = other RNA
ccttgtggacactgggtgggc

SEQ ID NO: 15901 - RNA, 21 nt, synthetic construct
  source 1..21: mol_type = other RNA
cctttcaaggacctgcccagt

SEQ ID NO: 15902 - RNA, 21 nt, synthetic construct
  source 1..21: mol_type = other RNA
cctttccctttcaaggacctg

SEQ ID NO: 15903 - RNA, 21 nt, synthetic construct
  source 1..21: mol_type = other RNA
cctttcgtggtttccactgag

SEQ ID NO: 15904 - RNA, 21 nt, synthetic construct
  source 1..21: mol_type = other RNA
cctttctagtccccaatttat

SEQ ID NO: 15905 - RNA, 21 nt, synthetic construct
  source 1..21: mol_type = other RNA
cctttctctttctccatcctt

SEQ ID NO: 15906 - RNA, 21 nt, synthetic construct
  source 1..21: mol_type = other RNA
cctttgtgagaatggtgcgtc

SEQ ID NO: 15907 - RNA, 21 nt, synthetic construct
  source 1..21: mol_type = other RNA
ccttttgggtggattctcctc

SEQ ID NO: 15908 - RNA, 21 nt, synthetic construct
  source 1..21: mol_type = other RNA
cgaaaacagatccagggacac

SEQ ID NO: 15909 - RNA, 21 nt, synthetic construct
  source 1..21: mol_type = other RNA
cgaaaggactcctggctatct

SEQ ID NO: 15910 - RNA, 21 nt, synthetic construct
  source 1..21: mol_type = other RNA
cgaagagtgagtttgccaagc

SEQ ID NO: 15911 - RNA, 21 nt, synthetic construct
  source 1..21: mol_type = other RNA
cgaagccgtgggcccagggct

SEQ ID NO: 15912 - RNA, 21 nt, synthetic construct
  source 1..21: mol_type = other RNA
cgaagtccagggggtcggagg

SEQ ID NO: 15913 - RNA, 21 nt, synthetic construct
  source 1..21: mol_type = other RNA
cgaccccctggacttcggctt

SEQ ID NO: 15914 - RNA, 21 nt, synthetic construct
  source 1..21: mol_type = other RNA
cgacctggtgaacacctagga

SEQ ID NO: 15915 - RNA, 21 nt, synthetic construct
  source 1..21: mol_type = other RNA
cgagaaacacagccccaggtg

SEQ ID NO: 15916 - RNA, 21 nt, synthetic construct
  source 1..21: mol_type = other RNA
cgagaggccaccccagccctg

SEQ ID NO: 15917 - RNA, 21 nt, synthetic construct
  source 1..21: mol_type = other RNA
cgagccgagttcatcccgttc

SEQ ID NO: 15918 - RNA, 21 nt, synthetic construct
  source 1..21: mol_type = other RNA
cgagcttgacccttggaagga

SEQ ID NO: 15919 - RNA, 21 nt, synthetic construct
  source 1..21: mol_type = other RNA
cgaggaagggggacagggaag

SEQ ID NO: 15920 - RNA, 21 nt, synthetic construct
  source 1..21: mol_type = other RNA
cgagggccaagagcatgaggt

SEQ ID NO: 15921 - RNA, 21 nt, synthetic construct
  source 1..21: mol_type = other RNA
cgagtccaggccccagcccct

SEQ ID NO: 15922 - RNA, 21 nt, synthetic construct
  source 1..21: mol_type = other RNA
cgagttcatcccgttcccagg

SEQ ID NO: 15923 - RNA, 21 nt, synthetic construct
  source 1..21: mol_type = other RNA
cgagtttccatgacctcatgc

SEQ ID NO: 15924 - RNA, 21 nt, synthetic construct
  source 1..21: mol_type = other RNA
cgataggggaggggggcaagg

SEQ ID NO: 15925 - RNA, 21 nt, synthetic construct
  source 1..21: mol_type = other RNA
cgatgcttggggacctgcctg

SEQ ID NO: 15926 - RNA, 21 nt, synthetic construct
  source 1..21: mol_type = other RNA
cgcaccagacggccgcgtcag

SEQ ID NO: 15927 - RNA, 21 nt, synthetic construct
  source 1..21: mol_type = other RNA
cgcaccattctcacaaaggga

SEQ ID NO: 15928 - RNA, 21 nt, synthetic construct
  source 1..21: mol_type = other RNA
cgcacccagatgagaagcccc

SEQ ID NO: 15929 - RNA, 21 nt, synthetic construct
  source 1..21: mol_type = other RNA
cgcacggaggaacaatataaa

SEQ ID NO: 15930 - RNA, 21 nt, synthetic construct
  source 1..21: mol_type = other RNA
cgcacgtgccctgggaacggg

SEQ ID NO: 15931 - RNA, 21 nt, synthetic construct
  source 1..21: mol_type = other RNA
cgcagggtggccactgagaac

SEQ ID NO: 15932 - RNA, 21 nt, synthetic construct
  source 1..21: mol_type = other RNA
cgccacctgtgggtggtgacg

SEQ ID NO: 15933 - RNA, 21 nt, synthetic construct
  source 1..21: mol_type = other RNA
cgccatgacaactgggtggaa

SEQ ID NO: 15934 - RNA, 21 nt, synthetic construct
  source 1..21: mol_type = other RNA
cgcccagagcagggtcccgct

SEQ ID NO: 15935 - RNA, 21 nt, synthetic construct
  source 1..21: mol_type = other RNA
cgcccaggcccctgagtctgt

SEQ ID NO: 15936 - RNA, 21 nt, synthetic construct
  source 1..21: mol_type = other RNA
cgcccccctgctgtggctgtt

SEQ ID NO: 15937 - RNA, 21 nt, synthetic construct
  source 1..21: mol_type = other RNA
cgccctcagatgaaggagtcc

SEQ ID NO: 15938 - RNA, 21 nt, synthetic construct
  source 1..21: mol_type = other RNA
cgcctccctaagacccagaag

SEQ ID NO: 15939 - RNA, 21 nt, synthetic construct
  source 1..21: mol_type = other RNA
cgcctcctccagatgggcagc

SEQ ID NO: 15940 - RNA, 21 nt, synthetic construct
  source 1..21: mol_type = other RNA
cgcctctactccctttctctt

SEQ ID NO: 15941 - RNA, 21 nt, synthetic construct
  source 1..21: mol_type = other RNA
cgcctctcctgggcttgccaa

SEQ ID NO: 15942 - RNA, 21 nt, synthetic construct
  source 1..21: mol_type = other RNA
cgcctggttgcccagtggtca

SEQ ID NO: 15943 - RNA, 21 nt, synthetic construct
  source 1..21: mol_type = other RNA
cgcggccgtctggtgcgtttc

SEQ ID NO: 15944 - RNA, 21 nt, synthetic construct
  source 1..21: mol_type = other RNA
cgcgtcagagcagctcaggtt

SEQ ID NO: 15945 - RNA, 21 nt, synthetic construct
  source 1..21: mol_type = other RNA
cgctaccctctcccagaacct

SEQ ID NO: 15946 - RNA, 21 nt, synthetic construct
  source 1..21: mol_type = other RNA
cgctcaggcttccctgtcccc

SEQ ID NO: 15947 - RNA, 21 nt, synthetic construct
  source 1..21: mol_type = other RNA
cgcttccagtgctcagactag

SEQ ID NO: 15948 - RNA, 21 nt, synthetic construct
  source 1..21: mol_type = other RNA
cgcttccctaaggccctgctc

SEQ ID NO: 15949 - RNA, 21 nt, synthetic construct
  source 1..21: mol_type = other RNA
cggaaaccaccccagcagata

SEQ ID NO: 15950 - RNA, 21 nt, synthetic construct
  source 1..21: mol_type = other RNA
cggaagggctggggcctggcc

SEQ ID NO: 15951 - RNA, 21 nt, synthetic construct
  source 1..21: mol_type = other RNA
cggacacccccctcctcacca

SEQ ID NO: 15952 - RNA, 21 nt, synthetic construct
  source 1..21: mol_type = other RNA
cggacccaggagtccaggccc

SEQ ID NO: 15953 - RNA, 21 nt, synthetic construct
  source 1..21: mol_type = other RNA
cggagcccacccagtgtccac

SEQ ID NO: 15954 - RNA, 21 nt, synthetic construct
  source 1..21: mol_type = other RNA
cggaggaacaatataaattgg

SEQ ID NO: 15955 - RNA, 21 nt, synthetic construct
  source 1..21: mol_type = other RNA
cggaggaatatgtcccagata

SEQ ID NO: 15956 - RNA, 21 nt, synthetic construct
  source 1..21: mol_type = other RNA
cggaggagggacttgccccag

SEQ ID NO: 15957 - RNA, 21 nt, synthetic construct
  source 1..21: mol_type = other RNA
cggcaaaacccccgtcaccac

SEQ ID NO: 15958 - RNA, 21 nt, synthetic construct
  source 1..21: mol_type = other RNA
cggccacgacctggtgaacac

SEQ ID NO: 15959 - RNA, 21 nt, synthetic construct
  source 1..21: mol_type = other RNA
cggccaggccttcagtgctca

SEQ ID NO: 15960 - RNA, 21 nt, synthetic construct
  source 1..21: mol_type = other RNA
cggccagtttctccacctggg

SEQ ID NO: 15961 - RNA, 21 nt, synthetic construct
  source 1..21: mol_type = other RNA
cggccccttcacagcccgagt

SEQ ID NO: 15962 - RNA, 21 nt, synthetic construct
  source 1..21: mol_type = other RNA
cggccgcgtcagagcagctca

SEQ ID NO: 15963 - RNA, 21 nt, synthetic construct
  source 1..21: mol_type = other RNA
cggccgtctggtgcgtttcac

SEQ ID NO: 15964 - RNA, 21 nt, synthetic construct
  source 1..21: mol_type = other RNA
cggcctgaccactgggcaacc

SEQ ID NO: 15965 - RNA, 21 nt, synthetic construct
  source 1..21: mol_type = other RNA
cggctcgtttatttccaccca

SEQ ID NO: 15966 - RNA, 21 nt, synthetic construct
  source 1..21: mol_type = other RNA
cggcttcgttcctgcagagta

SEQ ID NO: 15967 - RNA, 21 nt, synthetic construct
  source 1..21: mol_type = other RNA
cggcttttgtccccccaagtt

SEQ ID NO: 15968 - RNA, 21 nt, synthetic construct
  source 1..21: mol_type = other RNA
cgggaaccccacatggtacct

SEQ ID NO: 15969 - RNA, 21 nt, synthetic construct
  source 1..21: mol_type = other RNA
cgggaatcaagagtcacccag

SEQ ID NO: 15970 - RNA, 21 nt, synthetic construct
  source 1..21: mol_type = other RNA
cgggaccctgctctgggcgga

SEQ ID NO: 15971 - RNA, 21 nt, synthetic construct
  source 1..21: mol_type = other RNA
cgggacctgaactggagctga

SEQ ID NO: 15972 - RNA, 21 nt, synthetic construct
  source 1..21: mol_type = other RNA
cgggactccagagggagccac

SEQ ID NO: 15973 - RNA, 21 nt, synthetic construct
  source 1..21: mol_type = other RNA
cgggactcccagaggggtgag

SEQ ID NO: 15974 - RNA, 21 nt, synthetic construct
  source 1..21: mol_type = other RNA
cgggagggagctacgagggcc

SEQ ID NO: 15975 - RNA, 21 nt, synthetic construct
  source 1..21: mol_type = other RNA
cgggataaattaccccccaag

SEQ ID NO: 15976 - RNA, 21 nt, synthetic construct
  source 1..21: mol_type = other RNA
cgggatgaactcggctcgttt

SEQ ID NO: 15977 - RNA, 21 nt, synthetic construct
  source 1..21: mol_type = other RNA
cgggccaccgtttctcattct

SEQ ID NO: 15978 - RNA, 21 nt, synthetic construct
  source 1..21: mol_type = other RNA
cgggctgtgaaggggccgcac

SEQ ID NO: 15979 - RNA, 21 nt, synthetic construct
  source 1..21: mol_type = other RNA
cggggaagggagggggcttct

SEQ ID NO: 15980 - RNA, 21 nt, synthetic construct
  source 1..21: mol_type = other RNA
cggggatgcaggggaacgggg

SEQ ID NO: 15981 - RNA, 21 nt, synthetic construct
  source 1..21: mol_type = other RNA
cggggccctgcagccaggggc

SEQ ID NO: 15982 - RNA, 21 nt, synthetic construct
  source 1..21: mol_type = other RNA
cggggctcagtctgaagagca

SEQ ID NO: 15983 - RNA, 21 nt, synthetic construct
  source 1..21: mol_type = other RNA
cggggctggctactggcctta

SEQ ID NO: 15984 - RNA, 21 nt, synthetic construct
  source 1..21: mol_type = other RNA
cggggctgggcctggacccct

SEQ ID NO: 15985 - RNA, 21 nt, synthetic construct
  source 1..21: mol_type = other RNA
cgggggttttgccgtgtctaa

SEQ ID NO: 15986 - RNA, 21 nt, synthetic construct
  source 1..21: mol_type = other RNA
cggggtatcccaggaggcctg

SEQ ID NO: 15987 - RNA, 21 nt, synthetic construct
  source 1..21: mol_type = other RNA
cggtgctaggacagtggggaa

SEQ ID NO: 15988 - RNA, 21 nt, synthetic construct
  source 1..21: mol_type = other RNA
cggtggcccgtgtcagcccct

SEQ ID NO: 15989 - RNA, 21 nt, synthetic construct
  source 1..21: mol_type = other RNA
cggtgtcccagcaagtcggga

SEQ ID NO: 15990 - RNA, 21 nt, synthetic construct
  source 1..21: mol_type = other RNA
cggttctcagtggccaccctg

SEQ ID NO: 15991 - RNA, 21 nt, synthetic construct
  source 1..21: mol_type = other RNA
cgtaacctgagaagggaatcc

SEQ ID NO: 15992 - RNA, 21 nt, synthetic construct
  source 1..21: mol_type = other RNA
cgtagctccctcccgcctcct

SEQ ID NO: 15993 - RNA, 21 nt, synthetic construct
  source 1..21: mol_type = other RNA
cgtatcttaaacagccagtgg

SEQ ID NO: 15994 - RNA, 21 nt, synthetic construct
  source 1..21: mol_type = other RNA
cgtcaccacccacaggtggcg

SEQ ID NO: 15995 - RNA, 21 nt, synthetic construct
  source 1..21: mol_type = other RNA
cgtcagagcagctcaggttct

SEQ ID NO: 15996 - RNA, 21 nt, synthetic construct
  source 1..21: mol_type = other RNA
cgtcagttttacctgtgagat

SEQ ID NO: 15997 - RNA, 21 nt, synthetic construct
  source 1..21: mol_type = other RNA
cgtccaccatctcatgcccct

SEQ ID NO: 15998 - RNA, 21 nt, synthetic construct
  source 1..21: mol_type = other RNA
cgtcctaggtgttcaccaggt

SEQ ID NO: 15999 - RNA, 21 nt, synthetic construct
  source 1..21: mol_type = other RNA
cgtcctgcatccttctccagg

SEQ ID NO: 16000 - RNA, 21 nt, synthetic construct
  source 1..21: mol_type = other RNA
cgtcctggcagggctgtggtg

SEQ ID NO: 16001 - RNA, 21 nt, synthetic construct
  source 1..21: mol_type = other RNA
cgtctggtgcgtttcactgat

SEQ ID NO: 16002 - RNA, 21 nt, synthetic construct
  source 1..21: mol_type = other RNA
cgtgacctgcccggttctcag

SEQ ID NO: 16003 - RNA, 21 nt, synthetic construct
  source 1..21: mol_type = other RNA
cgtgcagagggggcctcagtg

SEQ ID NO: 16004 - RNA, 21 nt, synthetic construct
  source 1..21: mol_type = other RNA
cgtgccctgggaacgggatga

SEQ ID NO: 16005 - RNA, 21 nt, synthetic construct
  source 1..21: mol_type = other RNA
cgtgcggccccttcacagccc

SEQ ID NO: 16006 - RNA, 21 nt, synthetic construct
  source 1..21: mol_type = other RNA
cgtgcgtcagttttacctgtg

SEQ ID NO: 16007 - RNA, 21 nt, synthetic construct
  source 1..21: mol_type = other RNA
cgtggatctaggagtttagct

SEQ ID NO: 16008 - RNA, 21 nt, synthetic construct
  source 1..21: mol_type = other RNA
cgtggccaagaagcaggggag

SEQ ID NO: 16009 - RNA, 21 nt, synthetic construct
  source 1..21: mol_type = other RNA
cgtggccgcctctactccctt

SEQ ID NO: 16010 - RNA, 21 nt, synthetic construct
  source 1..21: mol_type = other RNA
cgtggctccctctggagtccc

SEQ ID NO: 16011 - RNA, 21 nt, synthetic construct
  source 1..21: mol_type = other RNA
cgtgggcccagggctatgcag

SEQ ID NO: 16012 - RNA, 21 nt, synthetic construct
  source 1..21: mol_type = other RNA
cgtggggtaccctaagaactt

SEQ ID NO: 16013 - RNA, 21 nt, synthetic construct
  source 1..21: mol_type = other RNA
cgtggggtccaggccaagtag

SEQ ID NO: 16014 - RNA, 21 nt, synthetic construct
  source 1..21: mol_type = other RNA
cgtgggtctgagggaggaggg

SEQ ID NO: 16015 - RNA, 21 nt, synthetic construct
  source 1..21: mol_type = other RNA
cgtgggtttatcaaccacttg

SEQ ID NO: 16016 - RNA, 21 nt, synthetic construct
  source 1..21: mol_type = other RNA
cgtggtttccactgagcactg

SEQ ID NO: 16017 - RNA, 21 nt, synthetic construct
  source 1..21: mol_type = other RNA
cgtgtcagcccctggctgcag

SEQ ID NO: 16018 - RNA, 21 nt, synthetic construct
  source 1..21: mol_type = other RNA
cgtgtccctggatctgttttc

SEQ ID NO: 16019 - RNA, 21 nt, synthetic construct
  source 1..21: mol_type = other RNA
cgtgtctaacaggtaccatgt

SEQ ID NO: 16020 - RNA, 21 nt, synthetic construct
  source 1..21: mol_type = other RNA
cgtgtggaaaactccctttgt

SEQ ID NO: 16021 - RNA, 21 nt, synthetic construct
  source 1..21: mol_type = other RNA
cgttcacttcctgtttgcaga

SEQ ID NO: 16022 - RNA, 21 nt, synthetic construct
  source 1..21: mol_type = other RNA
cgttcccagggcacgtgcggc

SEQ ID NO: 16023 - RNA, 21 nt, synthetic construct
  source 1..21: mol_type = other RNA
cgttcccctgcatcccccttc

SEQ ID NO: 16024 - RNA, 21 nt, synthetic construct
  source 1..21: mol_type = other RNA
cgttcccctgcatccccgttc

SEQ ID NO: 16025 - RNA, 21 nt, synthetic construct
  source 1..21: mol_type = other RNA
cgttcctgcagagtatctgct

SEQ ID NO: 16026 - RNA, 21 nt, synthetic construct
  source 1..21: mol_type = other RNA
cgtttatttccacccagttgt

SEQ ID NO: 16027 - RNA, 21 nt, synthetic construct
  source 1..21: mol_type = other RNA
cgtttcactgatcctggtgct

SEQ ID NO: 16028 - RNA, 21 nt, synthetic construct
  source 1..21: mol_type = other RNA
cgtttctcattcttcccttag

SEQ ID NO: 16029 - RNA, 21 nt, synthetic construct
  source 1..21: mol_type = other RNA
ctaaaactaggctgtcctggg

SEQ ID NO: 16030 - RNA, 21 nt, synthetic construct
  source 1..21: mol_type = other RNA
ctaaactcctagatccacggg

SEQ ID NO: 16031 - RNA, 21 nt, synthetic construct
  source 1..21: mol_type = other RNA
ctaacaggtaccatgtggggt

SEQ ID NO: 16032 - RNA, 21 nt, synthetic construct
  source 1..21: mol_type = other RNA
ctaactttggctcttcacctt

SEQ ID NO: 16033 - RNA, 21 nt, synthetic construct
  source 1..21: mol_type = other RNA
ctaagaacttgggaacagcca

SEQ ID NO: 16034 - RNA, 21 nt, synthetic construct
  source 1..21: mol_type = other RNA
ctaagaatcctggctccagcc

SEQ ID NO: 16035 - RNA, 21 nt, synthetic construct
  source 1..21: mol_type = other RNA
ctaagacccagaagtccaggc

SEQ ID NO: 16036 - RNA, 21 nt, synthetic construct
  source 1..21: mol_type = other RNA
ctaaggcaattggggtgcagg

SEQ ID NO: 16037 - RNA, 21 nt, synthetic construct
  source 1..21: mol_type = other RNA
ctaaggccctgctctgggctt

SEQ ID NO: 16038 - RNA, 21 nt, synthetic construct
  source 1..21: mol_type = other RNA
ctaagggaagaatgagaaacg

SEQ ID NO: 16039 - RNA, 21 nt, synthetic construct
  source 1..21: mol_type = other RNA
ctacaggggttcctggctctg

SEQ ID NO: 16040 - RNA, 21 nt, synthetic construct
  source 1..21: mol_type = other RNA
ctaccaggctgccttttgggt

SEQ ID NO: 16041 - RNA, 21 nt, synthetic construct
  source 1..21: mol_type = other RNA
ctaccctctcccagaacctga

SEQ ID NO: 16042 - RNA, 21 nt, synthetic construct
  source 1..21: mol_type = other RNA
ctacgagggccaagagcatga

SEQ ID NO: 16043 - RNA, 21 nt, synthetic construct
  source 1..21: mol_type = other RNA
ctactccctttctctttctcc

SEQ ID NO: 16044 - RNA, 21 nt, synthetic construct
  source 1..21: mol_type = other RNA
ctactctagcccccaaccccc

SEQ ID NO: 16045 - RNA, 21 nt, synthetic construct
  source 1..21: mol_type = other RNA
ctactggccttatctcacagg

SEQ ID NO: 16046 - RNA, 21 nt, synthetic construct
  source 1..21: mol_type = other RNA
ctacttggcctggaccccacg

SEQ ID NO: 16047 - RNA, 21 nt, synthetic construct
  source 1..21: mol_type = other RNA
ctagaaaggtgaagagccaaa

SEQ ID NO: 16048 - RNA, 21 nt, synthetic construct
  source 1..21: mol_type = other RNA
ctagagtaggaggggctggag

SEQ ID NO: 16049 - RNA, 21 nt, synthetic construct
  source 1..21: mol_type = other RNA
ctagatccacgggataaatta

SEQ ID NO: 16050 - RNA, 21 nt, synthetic construct
  source 1..21: mol_type = other RNA
ctagcaccgtgtccctggatc

SEQ ID NO: 16051 - RNA, 21 nt, synthetic construct
  source 1..21: mol_type = other RNA
ctagccactaaggcaattggg

SEQ ID NO: 16052 - RNA, 21 nt, synthetic construct
  source 1..21: mol_type = other RNA
ctagcccccaaccccctagcc

SEQ ID NO: 16053 - RNA, 21 nt, synthetic construct
  source 1..21: mol_type = other RNA
ctaggaaaacagggatggttg

SEQ ID NO: 16054 - RNA, 21 nt, synthetic construct
  source 1..21: mol_type = other RNA
ctaggacagtggggaaaatga

SEQ ID NO: 16055 - RNA, 21 nt, synthetic construct
  source 1..21: mol_type = other RNA
ctaggacgcaccattctcaca

SEQ ID NO: 16056 - RNA, 21 nt, synthetic construct
  source 1..21: mol_type = other RNA
ctaggactgagggtttcagtg

SEQ ID NO: 16057 - RNA, 21 nt, synthetic construct
  source 1..21: mol_type = other RNA
ctaggagtttagcttcactcc

SEQ ID NO: 16058 - RNA, 21 nt, synthetic construct
  source 1..21: mol_type = other RNA
ctaggctgtcctgggcaaaca

SEQ ID NO: 16059 - RNA, 21 nt, synthetic construct
  source 1..21: mol_type = other RNA
ctagggaagaggttccagccc

SEQ ID NO: 16060 - RNA, 21 nt, synthetic construct
  source 1..21: mol_type = other RNA
ctagggggttgggggctagag

SEQ ID NO: 16061 - RNA, 21 nt, synthetic construct
  source 1..21: mol_type = other RNA
ctaggtgttcaccaggtcgtg

SEQ ID NO: 16062 - RNA, 21 nt, synthetic construct
  source 1..21: mol_type = other RNA
ctagtccccaatttatattgt

SEQ ID NO: 16063 - RNA, 21 nt, synthetic construct
  source 1..21: mol_type = other RNA
ctagtctgagcactggaagcg

SEQ ID NO: 16064 - RNA, 21 nt, synthetic construct
  source 1..21: mol_type = other RNA
ctagttttagcactgaaaccc

SEQ ID NO: 16065 - RNA, 21 nt, synthetic construct
  source 1..21: mol_type = other RNA
ctatcgccatgacaactgggt

SEQ ID NO: 16066 - RNA, 21 nt, synthetic construct
  source 1..21: mol_type = other RNA
ctatctgcaaacaggaagtga

SEQ ID NO: 16067 - RNA, 21 nt, synthetic construct
  source 1..21: mol_type = other RNA
ctatctgggacatattcctcc

SEQ ID NO: 16068 - RNA, 21 nt, synthetic construct
  source 1..21: mol_type = other RNA
ctatgcagggtggaggaaggc

SEQ ID NO: 16069 - RNA, 21 nt, synthetic construct
  source 1..21: mol_type = other RNA
ctcaaacccagaagcccagag

SEQ ID NO: 16070 - RNA, 21 nt, synthetic construct
  source 1..21: mol_type = other RNA
ctcaaacccaggagcccaggc

SEQ ID NO: 16071 - RNA, 21 nt, synthetic construct
  source 1..21: mol_type = other RNA
ctcacaaagggagttttccac

SEQ ID NO: 16072 - RNA, 21 nt, synthetic construct
  source 1..21: mol_type = other RNA
ctcacaggtaaaactgacgca

SEQ ID NO: 16073 - RNA, 21 nt, synthetic construct
  source 1..21: mol_type = other RNA
ctcaccaagtggttgataaac

SEQ ID NO: 16074 - RNA, 21 nt, synthetic construct
  source 1..21: mol_type = other RNA
ctcaccacagccctgccagga

SEQ ID NO: 16075 - RNA, 21 nt, synthetic construct
  source 1..21: mol_type = other RNA
ctcacccctctgggagtcccg

SEQ ID NO: 16076 - RNA, 21 nt, synthetic construct
  source 1..21: mol_type = other RNA
ctcacctctccaaagctgccc

SEQ ID NO: 16077 - RNA, 21 nt, synthetic construct
  source 1..21: mol_type = other RNA
ctcactcttcggggtatccca

SEQ ID NO: 16078 - RNA, 21 nt, synthetic construct
  source 1..21: mol_type = other RNA
ctcagacccacgagtccaggc

SEQ ID NO: 16079 - RNA, 21 nt, synthetic construct
  source 1..21: mol_type = other RNA
ctcagactagggaagaggttc

SEQ ID NO: 16080 - RNA, 21 nt, synthetic construct
  source 1..21: mol_type = other RNA
ctcagatgaaggagtccaggc

SEQ ID NO: 16081 - RNA, 21 nt, synthetic construct
  source 1..21: mol_type = other RNA
ctcagctccagttcaggtccc

SEQ ID NO: 16082 - RNA, 21 nt, synthetic construct
  source 1..21: mol_type = other RNA
ctcaggaccaacttattctga

SEQ ID NO: 16083 - RNA, 21 nt, synthetic construct
  source 1..21: mol_type = other RNA
ctcaggcatctttcacaggga

SEQ ID NO: 16084 - RNA, 21 nt, synthetic construct
  source 1..21: mol_type = other RNA
ctcaggcttccctgtccccct

SEQ ID NO: 16085 - RNA, 21 nt, synthetic construct
  source 1..21: mol_type = other RNA
ctcaggggcctgggcgggact

SEQ ID NO: 16086 - RNA, 21 nt, synthetic construct
  source 1..21: mol_type = other RNA
ctcaggttacgtggccaagaa

SEQ ID NO: 16087 - RNA, 21 nt, synthetic construct
  source 1..21: mol_type = other RNA
ctcaggttctgggagagggta

SEQ ID NO: 16088 - RNA, 21 nt, synthetic construct
  source 1..21: mol_type = other RNA
ctcagtcctaggaaaacaggg

SEQ ID NO: 16089 - RNA, 21 nt, synthetic construct
  source 1..21: mol_type = other RNA
ctcagtctgaagagcagagcc

SEQ ID NO: 16090 - RNA, 21 nt, synthetic construct
  source 1..21: mol_type = other RNA
ctcagtgaactggagtgtgac

SEQ ID NO: 16091 - RNA, 21 nt, synthetic construct
  source 1..21: mol_type = other RNA
ctcagtggaaaccacgaaagg

SEQ ID NO: 16092 - RNA, 21 nt, synthetic construct
  source 1..21: mol_type = other RNA
ctcagtggccaccctgcgcta

SEQ ID NO: 16093 - RNA, 21 nt, synthetic construct
  source 1..21: mol_type = other RNA
ctcatctgggtgcgggaaccc

SEQ ID NO: 16094 - RNA, 21 nt, synthetic construct
  source 1..21: mol_type = other RNA
ctcatgcccctggctctcctg

SEQ ID NO: 16095 - RNA, 21 nt, synthetic construct
  source 1..21: mol_type = other RNA
ctcatgctcttggccctcgta

SEQ ID NO: 16096 - RNA, 21 nt, synthetic construct
  source 1..21: mol_type = other RNA
ctcattcttcccttaggggtc

SEQ ID NO: 16097 - RNA, 21 nt, synthetic construct
  source 1..21: mol_type = other RNA
ctccaaagctgcccatctgga

SEQ ID NO: 16098 - RNA, 21 nt, synthetic construct
  source 1..21: mol_type = other RNA
ctccaactgtggggtgactgc

SEQ ID NO: 16099 - RNA, 21 nt, synthetic construct
  source 1..21: mol_type = other RNA
ctccaccctgcatagccctgg

SEQ ID NO: 16100 - RNA, 21 nt, synthetic construct
  source 1..21: mol_type = other RNA
ctccacctggggctgtgtttc

SEQ ID NO: 16101 - RNA, 21 nt, synthetic construct
  source 1..21: mol_type = other RNA
ctccagagggagccacgaaaa

SEQ ID NO: 16102 - RNA, 21 nt, synthetic construct
  source 1..21: mol_type = other RNA
ctccagagtccaggcccaacc

SEQ ID NO: 16103 - RNA, 21 nt, synthetic construct
  source 1..21: mol_type = other RNA
ctccagatgggcagctttgga

SEQ ID NO: 16104 - RNA, 21 nt, synthetic construct
  source 1..21: mol_type = other RNA
ctccagcccctcctactctag

SEQ ID NO: 16105 - RNA, 21 nt, synthetic construct
  source 1..21: mol_type = other RNA
ctccaggcaggtccccaagca

SEQ ID NO: 16106 - RNA, 21 nt, synthetic construct
  source 1..21: mol_type = other RNA
ctccaggcctcctgggatacc

SEQ ID NO: 16107 - RNA, 21 nt, synthetic construct
  source 1..21: mol_type = other RNA
ctccagttcactgaggccccc

SEQ ID NO: 16108 - RNA, 21 nt, synthetic construct
  source 1..21: mol_type = other RNA
ctccagttcaggtcccggagc

SEQ ID NO: 16109 - RNA, 21 nt, synthetic construct
  source 1..21: mol_type = other RNA
ctccatccttctttccttaaa

SEQ ID NO: 16110 - RNA, 21 nt, synthetic construct
  source 1..21: mol_type = other RNA
ctcccagaacctgagctgctc

SEQ ID NO: 16111 - RNA, 21 nt, synthetic construct
  source 1..21: mol_type = other RNA
ctcccagaggggtgagacagc

SEQ ID NO: 16112 - RNA, 21 nt, synthetic construct
  source 1..21: mol_type = other RNA
ctccccattcaacccaggagg

SEQ ID NO: 16113 - RNA, 21 nt, synthetic construct
  source 1..21: mol_type = other RNA
ctccccattcagacccagggg

SEQ ID NO: 16114 - RNA, 21 nt, synthetic construct
  source 1..21: mol_type = other RNA
ctcccctatcgccatgacaac

SEQ ID NO: 16115 - RNA, 21 nt, synthetic construct
  source 1..21: mol_type = other RNA
ctcccctgcttcttggccacg

SEQ ID NO: 16116 - RNA, 21 nt, synthetic construct
  source 1..21: mol_type = other RNA
ctcccgcctcctccagatggg

SEQ ID NO: 16117 - RNA, 21 nt, synthetic construct
  source 1..21: mol_type = other RNA
ctccctaagacccagaagtcc

SEQ ID NO: 16118 - RNA, 21 nt, synthetic construct
  source 1..21: mol_type = other RNA
ctccctcccgcctcctccaga

SEQ ID NO: 16119 - RNA, 21 nt, synthetic construct
  source 1..21: mol_type = other RNA
ctccctcggacccaggagtcc

SEQ ID NO: 16120 - RNA, 21 nt, synthetic construct
  source 1..21: mol_type = other RNA
ctccctctggagtcccgactt

SEQ ID NO: 16121 - RNA, 21 nt, synthetic construct
  source 1..21: mol_type = other RNA
ctcccttccccgttcacttcc

SEQ ID NO: 16122 - RNA, 21 nt, synthetic construct
  source 1..21: mol_type = other RNA
ctccctttctctttctccatc

SEQ ID NO: 16123 - RNA, 21 nt, synthetic construct
  source 1..21: mol_type = other RNA
ctccctttgtgagaatggtgc

SEQ ID NO: 16124 - RNA, 21 nt, synthetic construct
  source 1..21: mol_type = other RNA
ctccgaccccctggacttcgg

SEQ ID NO: 16125 - RNA, 21 nt, synthetic construct
  source 1..21: mol_type = other RNA
ctccgcccagagcagggtccc

SEQ ID NO: 16126 - RNA, 21 nt, synthetic construct
  source 1..21: mol_type = other RNA
ctccgggacctgaactggagc

SEQ ID NO: 16127 - RNA, 21 nt, synthetic construct
  source 1..21: mol_type = other RNA
ctccgtgcgtcagttttacct

SEQ ID NO: 16128 - RNA, 21 nt, synthetic construct
  source 1..21: mol_type = other RNA
ctcctactctagcccccaacc

SEQ ID NO: 16129 - RNA, 21 nt, synthetic construct
  source 1..21: mol_type = other RNA
ctcctagatccacgggataaa

SEQ ID NO: 16130 - RNA, 21 nt, synthetic construct
  source 1..21: mol_type = other RNA
ctcctcaccacagccctgcca

SEQ ID NO: 16131 - RNA, 21 nt, synthetic construct
  source 1..21: mol_type = other RNA
ctcctccaactgtggggtgac

SEQ ID NO: 16132 - RNA, 21 nt, synthetic construct
  source 1..21: mol_type = other RNA
ctcctccagatgggcagcttt

SEQ ID NO: 16133 - RNA, 21 nt, synthetic construct
  source 1..21: mol_type = other RNA
ctcctccgaccccctggactt

SEQ ID NO: 16134 - RNA, 21 nt, synthetic construct
  source 1..21: mol_type = other RNA
ctcctccttcagagccaggag

SEQ ID NO: 16135 - RNA, 21 nt, synthetic construct
  source 1..21: mol_type = other RNA
ctcctctctcaaacccaggag

SEQ ID NO: 16136 - RNA, 21 nt, synthetic construct
  source 1..21: mol_type = other RNA
ctcctctctgaaccccagccc

SEQ ID NO: 16137 - RNA, 21 nt, synthetic construct
  source 1..21: mol_type = other RNA
ctcctcttgggaagtgtaagg

SEQ ID NO: 16138 - RNA, 21 nt, synthetic construct
  source 1..21: mol_type = other RNA
ctcctgccccttccctacagg

SEQ ID NO: 16139 - RNA, 21 nt, synthetic construct
  source 1..21: mol_type = other RNA
ctcctgccttaaacccagcca

SEQ ID NO: 16140 - RNA, 21 nt, synthetic construct
  source 1..21: mol_type = other RNA
ctcctggctatctgcaaacag

SEQ ID NO: 16141 - RNA, 21 nt, synthetic construct
  source 1..21: mol_type = other RNA
ctcctggctctgaaggaggag

SEQ ID NO: 16142 - RNA, 21 nt, synthetic construct
  source 1..21: mol_type = other RNA
ctcctgggataccccgaagag

SEQ ID NO: 16143 - RNA, 21 nt, synthetic construct
  source 1..21: mol_type = other RNA
ctcctgggcttgccaaggact

SEQ ID NO: 16144 - RNA, 21 nt, synthetic construct
  source 1..21: mol_type = other RNA
ctcctgggtctgagggtggag

SEQ ID NO: 16145 - RNA, 21 nt, synthetic construct
  source 1..21: mol_type = other RNA
ctcctgggttgaatggggagg

SEQ ID NO: 16146 - RNA, 21 nt, synthetic construct
  source 1..21: mol_type = other RNA
ctcctgggtttgagagaggag

SEQ ID NO: 16147 - RNA, 21 nt, synthetic construct
  source 1..21: mol_type = other RNA
ctccttcagagccaggagtcc

SEQ ID NO: 16148 - RNA, 21 nt, synthetic construct
  source 1..21: mol_type = other RNA
ctccttcatctgagggcggaa

SEQ ID NO: 16149 - RNA, 21 nt, synthetic construct
  source 1..21: mol_type = other RNA
ctccttcctcagctccagttc

SEQ ID NO: 16150 - RNA, 21 nt, synthetic construct
  source 1..21: mol_type = other RNA
ctccttgcccccctcccctat

SEQ ID NO: 16151 - RNA, 21 nt, synthetic construct
  source 1..21: mol_type = other RNA
ctcggaaaccaccccagcaga

SEQ ID NO: 16152 - RNA, 21 nt, synthetic construct
  source 1..21: mol_type = other RNA
ctcggacccaggagtccaggc

SEQ ID NO: 16153 - RNA, 21 nt, synthetic construct
  source 1..21: mol_type = other RNA
ctcggctcgtttatttccacc

SEQ ID NO: 16154 - RNA, 21 nt, synthetic construct
  source 1..21: mol_type = other RNA
ctcgggctgtgaaggggccgc

SEQ ID NO: 16155 - RNA, 21 nt, synthetic construct
  source 1..21: mol_type = other RNA
ctcgtagctccctcccgcctc

SEQ ID NO: 16156 - RNA, 21 nt, synthetic construct
  source 1..21: mol_type = other RNA
ctcgtccaccatctcatgccc

SEQ ID NO: 16157 - RNA, 21 nt, synthetic construct
  source 1..21: mol_type = other RNA
ctcgtcctgcatccttctcca

SEQ ID NO: 16158 - RNA, 21 nt, synthetic construct
  source 1..21: mol_type = other RNA
ctcgtggggtccaggccaagt

SEQ ID NO: 16159 - RNA, 21 nt, synthetic construct
  source 1..21: mol_type = other RNA
ctcgtgggtctgagggaggag

SEQ ID NO: 16160 - RNA, 21 nt, synthetic construct
  source 1..21: mol_type = other RNA
ctcgtttatttccacccagtt

SEQ ID NO: 16161 - RNA, 21 nt, synthetic construct
  source 1..21: mol_type = other RNA
ctctactccctttctctttct

SEQ ID NO: 16162 - RNA, 21 nt, synthetic construct
  source 1..21: mol_type = other RNA
ctctagcccccaaccccctag

SEQ ID NO: 16163 - RNA, 21 nt, synthetic construct
  source 1..21: mol_type = other RNA
ctctcaaacccaggagcccag

SEQ ID NO: 16164 - RNA, 21 nt, synthetic construct
  source 1..21: mol_type = other RNA
ctctccaaagctgcccatctg

SEQ ID NO: 16165 - RNA, 21 nt, synthetic construct
  source 1..21: mol_type = other RNA
ctctcccagaacctgagctgc

SEQ ID NO: 16166 - RNA, 21 nt, synthetic construct
  source 1..21: mol_type = other RNA
ctctccccattcagacccagg

SEQ ID NO: 16167 - RNA, 21 nt, synthetic construct
  source 1..21: mol_type = other RNA
ctctcctgccccttccctaca

SEQ ID NO: 16168 - RNA, 21 nt, synthetic construct
  source 1..21: mol_type = other RNA
ctctcctgggcttgccaagga

SEQ ID NO: 16169 - RNA, 21 nt, synthetic construct
  source 1..21: mol_type = other RNA
ctctccttgcccccctcccct

SEQ ID NO: 16170 - RNA, 21 nt, synthetic construct
  source 1..21: mol_type = other RNA
ctctcgtggggtccaggccaa

SEQ ID NO: 16171 - RNA, 21 nt, synthetic construct
  source 1..21: mol_type = other RNA
ctctctcaaacccaggagccc

SEQ ID NO: 16172 - RNA, 21 nt, synthetic construct
  source 1..21: mol_type = other RNA
ctctctgaaccccagcccacc

SEQ ID NO: 16173 - RNA, 21 nt, synthetic construct
  source 1..21: mol_type = other RNA
ctctgaaccccagcccacccc

SEQ ID NO: 16174 - RNA, 21 nt, synthetic construct
  source 1..21: mol_type = other RNA
ctctgaaggaggaggggctgg

SEQ ID NO: 16175 - RNA, 21 nt, synthetic construct
  source 1..21: mol_type = other RNA
ctctgacgcggccgtctggtg

SEQ ID NO: 16176 - RNA, 21 nt, synthetic construct
  source 1..21: mol_type = other RNA
ctctgcacggggccctgcagc

SEQ ID NO: 16177 - RNA, 21 nt, synthetic construct
  source 1..21: mol_type = other RNA
ctctgcaggaacgaagccgtg

SEQ ID NO: 16178 - RNA, 21 nt, synthetic construct
  source 1..21: mol_type = other RNA
ctctgctcttcagactgagcc

SEQ ID NO: 16179 - RNA, 21 nt, synthetic construct
  source 1..21: mol_type = other RNA
ctctggagtcccgacttgctg

SEQ ID NO: 16180 - RNA, 21 nt, synthetic construct
  source 1..21: mol_type = other RNA
ctctggagtccctggtgccca

SEQ ID NO: 16181 - RNA, 21 nt, synthetic construct
  source 1..21: mol_type = other RNA
ctctggccactggctgtttaa

SEQ ID NO: 16182 - RNA, 21 nt, synthetic construct
  source 1..21: mol_type = other RNA
ctctgggagtcccgcccaggc

SEQ ID NO: 16183 - RNA, 21 nt, synthetic construct
  source 1..21: mol_type = other RNA
ctctgggcggaggaatatgtc

SEQ ID NO: 16184 - RNA, 21 nt, synthetic construct
  source 1..21: mol_type = other RNA
ctctgggcttctgggtttgag

SEQ ID NO: 16185 - RNA, 21 nt, synthetic construct
  source 1..21: mol_type = other RNA
ctctgggggatgcaggggaag

SEQ ID NO: 16186 - RNA, 21 nt, synthetic construct
  source 1..21: mol_type = other RNA
ctctgggtgactcttgattcc

SEQ ID NO: 16187 - RNA, 21 nt, synthetic construct
  source 1..21: mol_type = other RNA
ctctgttcagccctaagaatc

SEQ ID NO: 16188 - RNA, 21 nt, synthetic construct
  source 1..21: mol_type = other RNA
ctcttcacctttctagtcccc

SEQ ID NO: 16189 - RNA, 21 nt, synthetic construct
  source 1..21: mol_type = other RNA
ctcttcagactgagccccgtt

SEQ ID NO: 16190 - RNA, 21 nt, synthetic construct
  source 1..21: mol_type = other RNA
ctcttccctagtctgagcact

SEQ ID NO: 16191 - RNA, 21 nt, synthetic construct
  source 1..21: mol_type = other RNA
ctcttcggggtatcccaggag

SEQ ID NO: 16192 - RNA, 21 nt, synthetic construct
  source 1..21: mol_type = other RNA
ctcttctctgttcagccctaa

SEQ ID NO: 16193 - RNA, 21 nt, synthetic construct
  source 1..21: mol_type = other RNA
ctcttgattcccggccagttt

SEQ ID NO: 16194 - RNA, 21 nt, synthetic construct
  source 1..21: mol_type = other RNA
ctcttggccctcgtagctccc

SEQ ID NO: 16195 - RNA, 21 nt, synthetic construct
  source 1..21: mol_type = other RNA
ctcttgggaagtgtaaggaag

SEQ ID NO: 16196 - RNA, 21 nt, synthetic construct
  source 1..21: mol_type = other RNA
ctctttaaggaaagaaggatg

SEQ ID NO: 16197 - RNA, 21 nt, synthetic construct
  source 1..21: mol_type = other RNA
ctctttctccatccttctttc

SEQ ID NO: 16198 - RNA, 21 nt, synthetic construct
  source 1..21: mol_type = other RNA
ctgaaaccctcagtcctagga

SEQ ID NO: 16199 - RNA, 21 nt, synthetic construct
  source 1..21: mol_type = other RNA
ctgaacagagaagagctgggg

SEQ ID NO: 16200 - RNA, 21 nt, synthetic construct
  source 1..21: mol_type = other RNA
ctgaaccccagcccaccccaa

SEQ ID NO: 16201 - RNA, 21 nt, synthetic construct
  source 1..21: mol_type = other RNA
ctgaactggagctgaggaagg

SEQ ID NO: 16202 - RNA, 21 nt, synthetic construct
  source 1..21: mol_type = other RNA
ctgaagagcagagccaggaac

SEQ ID NO: 16203 - RNA, 21 nt, synthetic construct
  source 1..21: mol_type = other RNA
ctgaaggaggaggggctggaa

SEQ ID NO: 16204 - RNA, 21 nt, synthetic construct
  source 1..21: mol_type = other RNA
ctgaaggcctggccggcctga

SEQ ID NO: 16205 - RNA, 21 nt, synthetic construct
  source 1..21: mol_type = other RNA
ctgaatggggagaggctgggg

SEQ ID NO: 16206 - RNA, 21 nt, synthetic construct
  source 1..21: mol_type = other RNA
ctgacacgggccaccgtttct

SEQ ID NO: 16207 - RNA, 21 nt, synthetic construct
  source 1..21: mol_type = other RNA
ctgaccactgggcaaccaggc

SEQ ID NO: 16208 - RNA, 21 nt, synthetic construct
  source 1..21: mol_type = other RNA
ctgacccaaacccagctcccc

SEQ ID NO: 16209 - RNA, 21 nt, synthetic construct
  source 1..21: mol_type = other RNA
ctgacgcacggaggaacaata

SEQ ID NO: 16210 - RNA, 21 nt, synthetic construct
  source 1..21: mol_type = other RNA
ctgacgcggccgtctggtgcg

SEQ ID NO: 16211 - RNA, 21 nt, synthetic construct
  source 1..21: mol_type = other RNA
ctgagaaccgggcaggtcacg

SEQ ID NO: 16212 - RNA, 21 nt, synthetic construct
  source 1..21: mol_type = other RNA
ctgagaagggaatccctcctc

SEQ ID NO: 16213 - RNA, 21 nt, synthetic construct
  source 1..21: mol_type = other RNA
ctgagcactgaaggcctggcc

SEQ ID NO: 16214 - RNA, 21 nt, synthetic construct
  source 1..21: mol_type = other RNA
ctgagcactggaagcgccacc

SEQ ID NO: 16215 - RNA, 21 nt, synthetic construct
  source 1..21: mol_type = other RNA
ctgagccccgttcccctgcat

SEQ ID NO: 16216 - RNA, 21 nt, synthetic construct
  source 1..21: mol_type = other RNA
ctgagcgcctctcctgggctt

SEQ ID NO: 16217 - RNA, 21 nt, synthetic construct
  source 1..21: mol_type = other RNA
ctgagctgctctgacgcggcc

SEQ ID NO: 16218 - RNA, 21 nt, synthetic construct
  source 1..21: mol_type = other RNA
ctgaggaaggagtgaagctaa

SEQ ID NO: 16219 - RNA, 21 nt, synthetic construct
  source 1..21: mol_type = other RNA
ctgaggccccctctgcacggg

SEQ ID NO: 16220 - RNA, 21 nt, synthetic construct
  source 1..21: mol_type = other RNA
ctgaggcctgggcaccaggga

SEQ ID NO: 16221 - RNA, 21 nt, synthetic construct
  source 1..21: mol_type = other RNA
ctgagggcggaagggctgggg

SEQ ID NO: 16222 - RNA, 21 nt, synthetic construct
  source 1..21: mol_type = other RNA
ctgagggtggagggactgggg

SEQ ID NO: 16223 - RNA, 21 nt, synthetic construct
  source 1..21: mol_type = other RNA
ctgagggtttcagtgctaaaa

SEQ ID NO: 16224 - RNA, 21 nt, synthetic construct
  source 1..21: mol_type = other RNA
ctgagtctgtcccagcacagg

SEQ ID NO: 16225 - RNA, 21 nt, synthetic construct
  source 1..21: mol_type = other RNA
ctgagttctaactttggctct

SEQ ID NO: 16226 - RNA, 21 nt, synthetic construct
  source 1..21: mol_type = other RNA
ctgatcctggtgctgcagctt

SEQ ID NO: 16227 - RNA, 21 nt, synthetic construct
  source 1..21: mol_type = other RNA
ctgattttgtttttccaaact

SEQ ID NO: 16228 - RNA, 21 nt, synthetic construct
  source 1..21: mol_type = other RNA
ctgcaaacaggaagtgaacgg

SEQ ID NO: 16229 - RNA, 21 nt, synthetic construct
  source 1..21: mol_type = other RNA
ctgcacacctgtgtgcctggg

SEQ ID NO: 16230 - RNA, 21 nt, synthetic construct
  source 1..21: mol_type = other RNA
ctgcaccccaattgccttagt

SEQ ID NO: 16231 - RNA, 21 nt, synthetic construct
  source 1..21: mol_type = other RNA
ctgcacggggccctgcagcca

SEQ ID NO: 16232 - RNA, 21 nt, synthetic construct
  source 1..21: mol_type = other RNA
ctgcagagtatctgctggggt

SEQ ID NO: 16233 - RNA, 21 nt, synthetic construct
  source 1..21: mol_type = other RNA
ctgcagcaccaggatcagtga

SEQ ID NO: 16234 - RNA, 21 nt, synthetic construct
  source 1..21: mol_type = other RNA
ctgcagccaggggctgacacg

SEQ ID NO: 16235 - RNA, 21 nt, synthetic construct
  source 1..21: mol_type = other RNA
ctgcagcttccttacacttcc

SEQ ID NO: 16236 - RNA, 21 nt, synthetic construct
  source 1..21: mol_type = other RNA
ctgcaggaacgaagccgtggg

SEQ ID NO: 16237 - RNA, 21 nt, synthetic construct
  source 1..21: mol_type = other RNA
ctgcagggccccgtgcagagg

SEQ ID NO: 16238 - RNA, 21 nt, synthetic construct
  source 1..21: mol_type = other RNA
ctgcatagccctgggcccacg

SEQ ID NO: 16239 - RNA, 21 nt, synthetic construct
  source 1..21: mol_type = other RNA
ctgcatcccccagaggcccca

SEQ ID NO: 16240 - RNA, 21 nt, synthetic construct
  source 1..21: mol_type = other RNA
ctgcatcccccttcccctgca

SEQ ID NO: 16241 - RNA, 21 nt, synthetic construct
  source 1..21: mol_type = other RNA
ctgcatccccgttcccctgca

SEQ ID NO: 16242 - RNA, 21 nt, synthetic construct
  source 1..21: mol_type = other RNA
ctgcatccttctccaggcagg

SEQ ID NO: 16243 - RNA, 21 nt, synthetic construct
  source 1..21: mol_type = other RNA
ctgccaggacggggctggcta

SEQ ID NO: 16244 - RNA, 21 nt, synthetic construct
  source 1..21: mol_type = other RNA
ctgcccagtacaggcatccct

SEQ ID NO: 16245 - RNA, 21 nt, synthetic construct
  source 1..21: mol_type = other RNA
ctgcccatctggaggaggcgg

SEQ ID NO: 16246 - RNA, 21 nt, synthetic construct
  source 1..21: mol_type = other RNA
ctgcccccattcctgcacccc

SEQ ID NO: 16247 - RNA, 21 nt, synthetic construct
  source 1..21: mol_type = other RNA
ctgccccttccctacaggggt

SEQ ID NO: 16248 - RNA, 21 nt, synthetic construct
  source 1..21: mol_type = other RNA
ctgcccggttctcagtggcca

SEQ ID NO: 16249 - RNA, 21 nt, synthetic construct
  source 1..21: mol_type = other RNA
ctgcctggagaaggatgcagg

SEQ ID NO: 16250 - RNA, 21 nt, synthetic construct
  source 1..21: mol_type = other RNA
ctgccttaaacccagccaggt

SEQ ID NO: 16251 - RNA, 21 nt, synthetic construct
  source 1..21: mol_type = other RNA
ctgccttttgggtggattctc

SEQ ID NO: 16252 - RNA, 21 nt, synthetic construct
  source 1..21: mol_type = other RNA
ctgcgctaccctctcccagaa

SEQ ID NO: 16253 - RNA, 21 nt, synthetic construct
  source 1..21: mol_type = other RNA
ctgctctgacgcggccgtctg

SEQ ID NO: 16254 - RNA, 21 nt, synthetic construct
  source 1..21: mol_type = other RNA
ctgctctgggcggaggaatat

SEQ ID NO: 16255 - RNA, 21 nt, synthetic construct
  source 1..21: mol_type = other RNA
ctgctctgggcttctgggttt

SEQ ID NO: 16256 - RNA, 21 nt, synthetic construct
  source 1..21: mol_type = other RNA
ctgctcttcagactgagcccc

SEQ ID NO: 16257 - RNA, 21 nt, synthetic construct
  source 1..21: mol_type = other RNA
ctgctggggtggtttccgagc

SEQ ID NO: 16258 - RNA, 21 nt, synthetic construct
  source 1..21: mol_type = other RNA
ctgctgtggctgttcccaagt

SEQ ID NO: 16259 - RNA, 21 nt, synthetic construct
  source 1..21: mol_type = other RNA
ctgcttctcctcttgggaagt

SEQ ID NO: 16260 - RNA, 21 nt, synthetic construct
  source 1..21: mol_type = other RNA
ctgcttcttggccacgtaacc

SEQ ID NO: 16261 - RNA, 21 nt, synthetic construct
  source 1..21: mol_type = other RNA
ctgcttggcaaactcactctt

SEQ ID NO: 16262 - RNA, 21 nt, synthetic construct
  source 1..21: mol_type = other RNA
ctggaacctcttccctagtct

SEQ ID NO: 16263 - RNA, 21 nt, synthetic construct
  source 1..21: mol_type = other RNA
ctggaagcgccacctgtgggt

SEQ ID NO: 16264 - RNA, 21 nt, synthetic construct
  source 1..21: mol_type = other RNA
ctggaccccacgagaggccac

SEQ ID NO: 16265 - RNA, 21 nt, synthetic construct
  source 1..21: mol_type = other RNA
ctggacccctgggtctgaatg

SEQ ID NO: 16266 - RNA, 21 nt, synthetic construct
  source 1..21: mol_type = other RNA
ctggactcctgggtctgaggg

SEQ ID NO: 16267 - RNA, 21 nt, synthetic construct
  source 1..21: mol_type = other RNA
ctggactccttcatctgaggg

SEQ ID NO: 16268 - RNA, 21 nt, synthetic construct
  source 1..21: mol_type = other RNA
ctggactctggagtccctggt

SEQ ID NO: 16269 - RNA, 21 nt, synthetic construct
  source 1..21: mol_type = other RNA
ctggacttcggcttttgtccc

SEQ ID NO: 16270 - RNA, 21 nt, synthetic construct
  source 1..21: mol_type = other RNA
ctggacttctgggtcttaggg

SEQ ID NO: 16271 - RNA, 21 nt, synthetic construct
  source 1..21: mol_type = other RNA
ctggagaaggatgcaggacga

SEQ ID NO: 16272 - RNA, 21 nt, synthetic construct
  source 1..21: mol_type = other RNA
ctggagcattggggtgggctg

SEQ ID NO: 16273 - RNA, 21 nt, synthetic construct
  source 1..21: mol_type = other RNA
ctggagccaggattcttaggg

SEQ ID NO: 16274 - RNA, 21 nt, synthetic construct
  source 1..21: mol_type = other RNA
ctggagctgaggaaggagtga

SEQ ID NO: 16275 - RNA, 21 nt, synthetic construct
  source 1..21: mol_type = other RNA
ctggaggaggcgggagggagc

SEQ ID NO: 16276 - RNA, 21 nt, synthetic construct
  source 1..21: mol_type = other RNA
ctggagtcccgacttgctggg

SEQ ID NO: 16277 - RNA, 21 nt, synthetic construct
  source 1..21: mol_type = other RNA
ctggagtccctggtgcccagg

SEQ ID NO: 16278 - RNA, 21 nt, synthetic construct
  source 1..21: mol_type = other RNA
ctggagtgtgacagcctgggg

SEQ ID NO: 16279 - RNA, 21 nt, synthetic construct
  source 1..21: mol_type = other RNA
ctggatctgttttcgtggctc

SEQ ID NO: 16280 - RNA, 21 nt, synthetic construct
  source 1..21: mol_type = other RNA
ctggcagggctgtggtgagga

SEQ ID NO: 16281 - RNA, 21 nt, synthetic construct
  source 1..21: mol_type = other RNA
ctggccactggctgtttaaga

SEQ ID NO: 16282 - RNA, 21 nt, synthetic construct
  source 1..21: mol_type = other RNA
ctggcccccagcccctcctgc

SEQ ID NO: 16283 - RNA, 21 nt, synthetic construct
  source 1..21: mol_type = other RNA
ctggccggcctgaccactggg

SEQ ID NO: 16284 - RNA, 21 nt, synthetic construct
  source 1..21: mol_type = other RNA
ctggccgggaatcaagagtca

SEQ ID NO: 16285 - RNA, 21 nt, synthetic construct
  source 1..21: mol_type = other RNA
ctggcctcctgggttgaatgg

SEQ ID NO: 16286 - RNA, 21 nt, synthetic construct
  source 1..21: mol_type = other RNA
ctggccttatctcacaggtaa

SEQ ID NO: 16287 - RNA, 21 nt, synthetic construct
  source 1..21: mol_type = other RNA
ctggctactggccttatctca

SEQ ID NO: 16288 - RNA, 21 nt, synthetic construct
  source 1..21: mol_type = other RNA
ctggctatctgcaaacaggaa

SEQ ID NO: 16289 - RNA, 21 nt, synthetic construct
  source 1..21: mol_type = other RNA
ctggctccagcccctcctact

SEQ ID NO: 16290 - RNA, 21 nt, synthetic construct
  source 1..21: mol_type = other RNA
ctggctctcctgccccttccc

SEQ ID NO: 16291 - RNA, 21 nt, synthetic construct
  source 1..21: mol_type = other RNA
ctggctctgaaggaggagggg

SEQ ID NO: 16292 - RNA, 21 nt, synthetic construct
  source 1..21: mol_type = other RNA
ctggctctgctcttcagactg

SEQ ID NO: 16293 - RNA, 21 nt, synthetic construct
  source 1..21: mol_type = other RNA
ctggctgcagggccccgtgca

SEQ ID NO: 16294 - RNA, 21 nt, synthetic construct
  source 1..21: mol_type = other RNA
ctggctgggtttaaggcagga

SEQ ID NO: 16295 - RNA, 21 nt, synthetic construct
  source 1..21: mol_type = other RNA
ctggctgtttaagatacgcct

SEQ ID NO: 16296 - RNA, 21 nt, synthetic construct
  source 1..21: mol_type = other RNA
ctgggaacgggatgaactcgg

SEQ ID NO: 16297 - RNA, 21 nt, synthetic construct
  source 1..21: mol_type = other RNA
ctgggacagactcaggggcct

SEQ ID NO: 16298 - RNA, 21 nt, synthetic construct
  source 1..21: mol_type = other RNA
ctgggacatattcctccgccc

SEQ ID NO: 16299 - RNA, 21 nt, synthetic construct
  source 1..21: mol_type = other RNA
ctgggagagggtagcgcaggg

SEQ ID NO: 16300 - RNA, 21 nt, synthetic construct
  source 1..21: mol_type = other RNA
ctgggagtcccgcccaggccc

SEQ ID NO: 16301 - RNA, 21 nt, synthetic construct
  source 1..21: mol_type = other RNA
ctgggataccccgaagagtga

SEQ ID NO: 16302 - RNA, 21 nt, synthetic construct
  source 1..21: mol_type = other RNA
ctgggcaaacagcataagctg

SEQ ID NO: 16303 - RNA, 21 nt, synthetic construct
  source 1..21: mol_type = other RNA
ctgggcaaccaggcgtatctt

SEQ ID NO: 16304 - RNA, 21 nt, synthetic construct
  source 1..21: mol_type = other RNA
ctgggcaccagggactccaga

SEQ ID NO: 16305 - RNA, 21 nt, synthetic construct
  source 1..21: mol_type = other RNA
ctgggcaggtccttgaaaggg

SEQ ID NO: 16306 - RNA, 21 nt, synthetic construct
  source 1..21: mol_type = other RNA
ctgggcccacggcttcgttcc

SEQ ID NO: 16307 - RNA, 21 nt, synthetic construct
  source 1..21: mol_type = other RNA
ctgggccccaggctgtcacac

SEQ ID NO: 16308 - RNA, 21 nt, synthetic construct
  source 1..21: mol_type = other RNA
ctgggcctggacccctgggtc

SEQ ID NO: 16309 - RNA, 21 nt, synthetic construct
  source 1..21: mol_type = other RNA
ctgggcggaggaatatgtccc

SEQ ID NO: 16310 - RNA, 21 nt, synthetic construct
  source 1..21: mol_type = other RNA
ctgggcgggactcccagaggg

SEQ ID NO: 16311 - RNA, 21 nt, synthetic construct
  source 1..21: mol_type = other RNA
ctgggctcctgggtttgagag

SEQ ID NO: 16312 - RNA, 21 nt, synthetic construct
  source 1..21: mol_type = other RNA
ctgggcttctgggtttgagtc

SEQ ID NO: 16313 - RNA, 21 nt, synthetic construct
  source 1..21: mol_type = other RNA
ctgggcttgccaaggactcaa

SEQ ID NO: 16314 - RNA, 21 nt, synthetic construct
  source 1..21: mol_type = other RNA
ctggggactctttaaggaaag

SEQ ID NO: 16315 - RNA, 21 nt, synthetic construct
  source 1..21: mol_type = other RNA
ctggggcaagtccctcctccg

SEQ ID NO: 16316 - RNA, 21 nt, synthetic construct
  source 1..21: mol_type = other RNA
ctggggcccaggcacacaggt

SEQ ID NO: 16317 - RNA, 21 nt, synthetic construct
  source 1..21: mol_type = other RNA
ctggggcctctgggggatgca

SEQ ID NO: 16318 - RNA, 21 nt, synthetic construct
  source 1..21: mol_type = other RNA
ctggggcctggactcctgggt

SEQ ID NO: 16319 - RNA, 21 nt, synthetic construct
  source 1..21: mol_type = other RNA
ctggggcctggcctcctgggt

SEQ ID NO: 16320 - RNA, 21 nt, synthetic construct
  source 1..21: mol_type = other RNA
ctggggctgtgtttctcgtcc

SEQ ID NO: 16321 - RNA, 21 nt, synthetic construct
  source 1..21: mol_type = other RNA
ctgggggatgcaggggaaggg

SEQ ID NO: 16322 - RNA, 21 nt, synthetic construct
  source 1..21: mol_type = other RNA
ctgggggccaggactcctggc

SEQ ID NO: 16323 - RNA, 21 nt, synthetic construct
  source 1..21: mol_type = other RNA
ctgggggcctggactccttca

SEQ ID NO: 16324 - RNA, 21 nt, synthetic construct
  source 1..21: mol_type = other RNA
ctgggggcctggacttctggg

SEQ ID NO: 16325 - RNA, 21 nt, synthetic construct
  source 1..21: mol_type = other RNA
ctgggggcctgggctcctggg

SEQ ID NO: 16326 - RNA, 21 nt, synthetic construct
  source 1..21: mol_type = other RNA
ctggggtggcctctcgtgggg

SEQ ID NO: 16327 - RNA, 21 nt, synthetic construct
  source 1..21: mol_type = other RNA
ctggggtggtttccgagcttg

SEQ ID NO: 16328 - RNA, 21 nt, synthetic construct
  source 1..21: mol_type = other RNA
ctggggttcagagaggaggga

SEQ ID NO: 16329 - RNA, 21 nt, synthetic construct
  source 1..21: mol_type = other RNA
ctgggtctgaatggggagagg

SEQ ID NO: 16330 - RNA, 21 nt, synthetic construct
  source 1..21: mol_type = other RNA
ctgggtctgagggtggaggga

SEQ ID NO: 16331 - RNA, 21 nt, synthetic construct
  source 1..21: mol_type = other RNA
ctgggtcttagggaggcgggg

SEQ ID NO: 16332 - RNA, 21 nt, synthetic construct
  source 1..21: mol_type = other RNA
ctgggtgactcttgattcccg

SEQ ID NO: 16333 - RNA, 21 nt, synthetic construct
  source 1..21: mol_type = other RNA
ctgggtgcgggaaccccacat

SEQ ID NO: 16334 - RNA, 21 nt, synthetic construct
  source 1..21: mol_type = other RNA
ctgggtggaaataaacgagcc

SEQ ID NO: 16335 - RNA, 21 nt, synthetic construct
  source 1..21: mol_type = other RNA
ctgggtgggctccgggacctg

SEQ ID NO: 16336 - RNA, 21 nt, synthetic construct
  source 1..21: mol_type = other RNA
ctgggtgtggggtgaccagct

SEQ ID NO: 16337 - RNA, 21 nt, synthetic construct
  source 1..21: mol_type = other RNA
ctgggttgaatggggaggggt

SEQ ID NO: 16338 - RNA, 21 nt, synthetic construct
  source 1..21: mol_type = other RNA
ctgggtttaaggcaggagggg

SEQ ID NO: 16339 - RNA, 21 nt, synthetic construct
  source 1..21: mol_type = other RNA
ctgggtttgagagaggagggg

SEQ ID NO: 16340 - RNA, 21 nt, synthetic construct
  source 1..21: mol_type = other RNA
ctgggtttgagtccttggcaa

SEQ ID NO: 16341 - RNA, 21 nt, synthetic construct
  source 1..21: mol_type = other RNA
ctgggtttgggtcaggtctgg

SEQ ID NO: 16342 - RNA, 21 nt, synthetic construct
  source 1..21: mol_type = other RNA
ctggtaccctgcccccattcc

SEQ ID NO: 16343 - RNA, 21 nt, synthetic construct
  source 1..21: mol_type = other RNA
ctggtagacagggctggggtg

SEQ ID NO: 16344 - RNA, 21 nt, synthetic construct
  source 1..21: mol_type = other RNA
ctggtcaccccacacccagac

SEQ ID NO: 16345 - RNA, 21 nt, synthetic construct
  source 1..21: mol_type = other RNA
ctggtgaacacctaggacgca

SEQ ID NO: 16346 - RNA, 21 nt, synthetic construct
  source 1..21: mol_type = other RNA
ctggtgcccaggcctcaggca

SEQ ID NO: 16347 - RNA, 21 nt, synthetic construct
  source 1..21: mol_type = other RNA
ctggtgcgtttcactgatcct

SEQ ID NO: 16348 - RNA, 21 nt, synthetic construct
  source 1..21: mol_type = other RNA
ctggtgctgcagcttccttac

SEQ ID NO: 16349 - RNA, 21 nt, synthetic construct
  source 1..21: mol_type = other RNA
ctggttgcccagtggtcaggc

SEQ ID NO: 16350 - RNA, 21 nt, synthetic construct
  source 1..21: mol_type = other RNA
ctgtactgggcaggtccttga

SEQ ID NO: 16351 - RNA, 21 nt, synthetic construct
  source 1..21: mol_type = other RNA
ctgtagggaaggggcaggaga

SEQ ID NO: 16352 - RNA, 21 nt, synthetic construct
  source 1..21: mol_type = other RNA
ctgtcacactccagttcactg

SEQ ID NO: 16353 - RNA, 21 nt, synthetic construct
  source 1..21: mol_type = other RNA
ctgtcccagcacagggtggcc

SEQ ID NO: 16354 - RNA, 21 nt, synthetic construct
  source 1..21: mol_type = other RNA
ctgtcccccttcctcgtccac

SEQ ID NO: 16355 - RNA, 21 nt, synthetic construct
  source 1..21: mol_type = other RNA
ctgtcctagcaccgtgtccct

SEQ ID NO: 16356 - RNA, 21 nt, synthetic construct
  source 1..21: mol_type = other RNA
ctgtcctgggcaaacagcata

SEQ ID NO: 16357 - RNA, 21 nt, synthetic construct
  source 1..21: mol_type = other RNA
ctgtctaccaggctgcctttt

SEQ ID NO: 16358 - RNA, 21 nt, synthetic construct
  source 1..21: mol_type = other RNA
ctgtctcacccctctgggagt

SEQ ID NO: 16359 - RNA, 21 nt, synthetic construct
  source 1..21: mol_type = other RNA
ctgtctctgggtgactcttga

SEQ ID NO: 16360 - RNA, 21 nt, synthetic construct
  source 1..21: mol_type = other RNA
ctgtgaaagatgcctgaggcc

SEQ ID NO: 16361 - RNA, 21 nt, synthetic construct
  source 1..21: mol_type = other RNA
ctgtgaaggggccgcacgtgc

SEQ ID NO: 16362 - RNA, 21 nt, synthetic construct
  source 1..21: mol_type = other RNA
ctgtgagataaggccagtagc

SEQ ID NO: 16363 - RNA, 21 nt, synthetic construct
  source 1..21: mol_type = other RNA
ctgtgctgggacagactcagg

SEQ ID NO: 16364 - RNA, 21 nt, synthetic construct
  source 1..21: mol_type = other RNA
ctgtggctgttcccaagttct

SEQ ID NO: 16365 - RNA, 21 nt, synthetic construct
  source 1..21: mol_type = other RNA
ctgtggggtgactgcttggca

SEQ ID NO: 16366 - RNA, 21 nt, synthetic construct
  source 1..21: mol_type = other RNA
ctgtgggtggtgacgggggtt

SEQ ID NO: 16367 - RNA, 21 nt, synthetic construct
  source 1..21: mol_type = other RNA
ctgtggtgaggaggggggtgt

SEQ ID NO: 16368 - RNA, 21 nt, synthetic construct
  source 1..21: mol_type = other RNA
ctgtgtgcctgggccccaggc

SEQ ID NO: 16369 - RNA, 21 nt, synthetic construct
  source 1..21: mol_type = other RNA
ctgtgtttctcgtcctgcatc

SEQ ID NO: 16370 - RNA, 21 nt, synthetic construct
  source 1..21: mol_type = other RNA
ctgttagacacggcaaaaccc

SEQ ID NO: 16371 - RNA, 21 nt, synthetic construct
  source 1..21: mol_type = other RNA
ctgttcagccctaagaatcct

SEQ ID NO: 16372 - RNA, 21 nt, synthetic construct
  source 1..21: mol_type = other RNA
ctgttcccaagttcttagggt

SEQ ID NO: 16373 - RNA, 21 nt, synthetic construct
  source 1..21: mol_type = other RNA
ctgttgggtcattttccccac

SEQ ID NO: 16374 - RNA, 21 nt, synthetic construct
  source 1..21: mol_type = other RNA
ctgtttaagatacgcctggtt

SEQ ID NO: 16375 - RNA, 21 nt, synthetic construct
  source 1..21: mol_type = other RNA
ctgtttgcagatagccaggag

SEQ ID NO: 16376 - RNA, 21 nt, synthetic construct
  source 1..21: mol_type = other RNA
ctgtttgcccaggacagccta

SEQ ID NO: 16377 - RNA, 21 nt, synthetic construct
  source 1..21: mol_type = other RNA
ctgttttcctaggactgaggg

SEQ ID NO: 16378 - RNA, 21 nt, synthetic construct
  source 1..21: mol_type = other RNA
ctgttttcgtggctccctctg

SEQ ID NO: 16379 - RNA, 21 nt, synthetic construct
  source 1..21: mol_type = other RNA
cttaaacagccagtggccaga

SEQ ID NO: 16380 - RNA, 21 nt, synthetic construct
  source 1..21: mol_type = other RNA
cttaaacccagccaggtcctt

SEQ ID NO: 16381 - RNA, 21 nt, synthetic construct
  source 1..21: mol_type = other RNA
cttaaagagtccccagtgcta

SEQ ID NO: 16382 - RNA, 21 nt, synthetic construct
  source 1..21: mol_type = other RNA
cttacacttcccaagaggaga

SEQ ID NO: 16383 - RNA, 21 nt, synthetic construct
  source 1..21: mol_type = other RNA
cttagggaagcgggaccctgc

SEQ ID NO: 16384 - RNA, 21 nt, synthetic construct
  source 1..21: mol_type = other RNA
cttagggaggcggggctgggc

SEQ ID NO: 16385 - RNA, 21 nt, synthetic construct
  source 1..21: mol_type = other RNA
cttagggctgaacagagaaga

SEQ ID NO: 16386 - RNA, 21 nt, synthetic construct
  source 1..21: mol_type = other RNA
cttaggggtccaaaacttggg

SEQ ID NO: 16387 - RNA, 21 nt, synthetic construct
  source 1..21: mol_type = other RNA
cttagggtaccccacgtgggt

SEQ ID NO: 16388 - RNA, 21 nt, synthetic construct
  source 1..21: mol_type = other RNA
cttagtggctagggggttggg

SEQ ID NO: 16389 - RNA, 21 nt, synthetic construct
  source 1..21: mol_type = other RNA
cttatctcacaggtaaaactg

SEQ ID NO: 16390 - RNA, 21 nt, synthetic construct
  source 1..21: mol_type = other RNA
cttatgctgtttgcccaggac

SEQ ID NO: 16391 - RNA, 21 nt, synthetic construct
  source 1..21: mol_type = other RNA
cttattctgattttgtttttc

SEQ ID NO: 16392 - RNA, 21 nt, synthetic construct
  source 1..21: mol_type = other RNA
cttcacagcccgagtttccat

SEQ ID NO: 16393 - RNA, 21 nt, synthetic construct
  source 1..21: mol_type = other RNA
cttcacctttctagtccccaa

SEQ ID NO: 16394 - RNA, 21 nt, synthetic construct
  source 1..21: mol_type = other RNA
cttcactccttcctcagctcc

SEQ ID NO: 16395 - RNA, 21 nt, synthetic construct
  source 1..21: mol_type = other RNA
cttcagactgagccccgttcc

SEQ ID NO: 16396 - RNA, 21 nt, synthetic construct
  source 1..21: mol_type = other RNA
cttcagagccaggagtcctgg

SEQ ID NO: 16397 - RNA, 21 nt, synthetic construct
  source 1..21: mol_type = other RNA
cttcagtgctcagtggaaacc

SEQ ID NO: 16398 - RNA, 21 nt, synthetic construct
  source 1..21: mol_type = other RNA
cttcatctgagggcggaaggg

SEQ ID NO: 16399 - RNA, 21 nt, synthetic construct
  source 1..21: mol_type = other RNA
cttccaagggtcaagctcgga

SEQ ID NO: 16400 - RNA, 21 nt, synthetic construct
  source 1..21: mol_type = other RNA
cttccagtgctcagactaggg

SEQ ID NO: 16401 - RNA, 21 nt, synthetic construct
  source 1..21: mol_type = other RNA
cttcccaagaggagaagcagt

SEQ ID NO: 16402 - RNA, 21 nt, synthetic construct
  source 1..21: mol_type = other RNA
cttccccgttcacttcctgtt

SEQ ID NO: 16403 - RNA, 21 nt, synthetic construct
  source 1..21: mol_type = other RNA
cttcccctgcatcccccagag

SEQ ID NO: 16404 - RNA, 21 nt, synthetic construct
  source 1..21: mol_type = other RNA
cttccctaaggccctgctctg

SEQ ID NO: 16405 - RNA, 21 nt, synthetic construct
  source 1..21: mol_type = other RNA
cttccctacaggggttcctgg

SEQ ID NO: 16406 - RNA, 21 nt, synthetic construct
  source 1..21: mol_type = other RNA
cttccctagtctgagcactgg

SEQ ID NO: 16407 - RNA, 21 nt, synthetic construct
  source 1..21: mol_type = other RNA
cttccctgtcccccttcctcg

SEQ ID NO: 16408 - RNA, 21 nt, synthetic construct
  source 1..21: mol_type = other RNA
cttcccttaggggtccaaaac

SEQ ID NO: 16409 - RNA, 21 nt, synthetic construct
  source 1..21: mol_type = other RNA
cttccgccctcagatgaagga

SEQ ID NO: 16410 - RNA, 21 nt, synthetic construct
  source 1..21: mol_type = other RNA
cttcctcagctccagttcagg

SEQ ID NO: 16411 - RNA, 21 nt, synthetic construct
  source 1..21: mol_type = other RNA
cttcctccaccctgcatagcc

SEQ ID NO: 16412 - RNA, 21 nt, synthetic construct
  source 1..21: mol_type = other RNA
cttcctcgtccaccatctcat

SEQ ID NO: 16413 - RNA, 21 nt, synthetic construct
  source 1..21: mol_type = other RNA
cttcctgtttgcagatagcca

SEQ ID NO: 16414 - RNA, 21 nt, synthetic construct
  source 1..21: mol_type = other RNA
cttccttacacttcccaagag

SEQ ID NO: 16415 - RNA, 21 nt, synthetic construct
  source 1..21: mol_type = other RNA
cttcggcttttgtccccccaa

SEQ ID NO: 16416 - RNA, 21 nt, synthetic construct
  source 1..21: mol_type = other RNA
cttcggggtatcccaggaggc

SEQ ID NO: 16417 - RNA, 21 nt, synthetic construct
  source 1..21: mol_type = other RNA
cttcgttcctgcagagtatct

SEQ ID NO: 16418 - RNA, 21 nt, synthetic construct
  source 1..21: mol_type = other RNA
cttctcaggttacgtggccaa

SEQ ID NO: 16419 - RNA, 21 nt, synthetic construct
  source 1..21: mol_type = other RNA
cttctcatctgggtgcgggaa

SEQ ID NO: 16420 - RNA, 21 nt, synthetic construct
  source 1..21: mol_type = other RNA
cttctccaggcaggtccccaa

SEQ ID NO: 16421 - RNA, 21 nt, synthetic construct
  source 1..21: mol_type = other RNA
cttctcctcttgggaagtgta

SEQ ID NO: 16422 - RNA, 21 nt, synthetic construct
  source 1..21: mol_type = other RNA
cttctctgttcagccctaaga

SEQ ID NO: 16423 - RNA, 21 nt, synthetic construct
  source 1..21: mol_type = other RNA
cttctgggtcttagggaggcg

SEQ ID NO: 16424 - RNA, 21 nt, synthetic construct
  source 1..21: mol_type = other RNA
cttctgggtttgagtccttgg

SEQ ID NO: 16425 - RNA, 21 nt, synthetic construct
  source 1..21: mol_type = other RNA
cttcttggccacgtaacctga

SEQ ID NO: 16426 - RNA, 21 nt, synthetic construct
  source 1..21: mol_type = other RNA
cttctttccttaaagagtccc

SEQ ID NO: 16427 - RNA, 21 nt, synthetic construct
  source 1..21: mol_type = other RNA
cttgaaagggaaaggcccatt

SEQ ID NO: 16428 - RNA, 21 nt, synthetic construct
  source 1..21: mol_type = other RNA
cttgacccttggaaggacctg

SEQ ID NO: 16429 - RNA, 21 nt, synthetic construct
  source 1..21: mol_type = other RNA
cttgattcccggccagtttct

SEQ ID NO: 16430 - RNA, 21 nt, synthetic construct
  source 1..21: mol_type = other RNA
cttgccaaggactcaaaccca

SEQ ID NO: 16431 - RNA, 21 nt, synthetic construct
  source 1..21: mol_type = other RNA
cttgccccaggccttgtggac

SEQ ID NO: 16432 - RNA, 21 nt, synthetic construct
  source 1..21: mol_type = other RNA
cttgcccccctcccctatcgc

SEQ ID NO: 16433 - RNA, 21 nt, synthetic construct
  source 1..21: mol_type = other RNA
cttggaaggacctggctgggt

SEQ ID NO: 16434 - RNA, 21 nt, synthetic construct
  source 1..21: mol_type = other RNA
cttggcaaactcactcttcgg

SEQ ID NO: 16435 - RNA, 21 nt, synthetic construct
  source 1..21: mol_type = other RNA
cttggcaagcccaggagaggc

SEQ ID NO: 16436 - RNA, 21 nt, synthetic construct
  source 1..21: mol_type = other RNA
cttggccacgtaacctgagaa

SEQ ID NO: 16437 - RNA, 21 nt, synthetic construct
  source 1..21: mol_type = other RNA
cttggccctcgtagctccctc

SEQ ID NO: 16438 - RNA, 21 nt, synthetic construct
  source 1..21: mol_type = other RNA
cttggcctggaccccacgaga

SEQ ID NO: 16439 - RNA, 21 nt, synthetic construct
  source 1..21: mol_type = other RNA
cttgggaacagccacagcagg

SEQ ID NO: 16440 - RNA, 21 nt, synthetic construct
  source 1..21: mol_type = other RNA
cttgggaagtgtaaggaagct

SEQ ID NO: 16441 - RNA, 21 nt, synthetic construct
  source 1..21: mol_type = other RNA
cttggggacctgcctggagaa

SEQ ID NO: 16442 - RNA, 21 nt, synthetic construct
  source 1..21: mol_type = other RNA
cttggggggacaaaagccgaa

SEQ ID NO: 16443 - RNA, 21 nt, synthetic construct
  source 1..21: mol_type = other RNA
cttggggggtaatttatcccg

SEQ ID NO: 16444 - RNA, 21 nt, synthetic construct
  source 1..21: mol_type = other RNA
cttggtgaggctggtaccctg

SEQ ID NO: 16445 - RNA, 21 nt, synthetic construct
  source 1..21: mol_type = other RNA
cttgtggacactgggtgggct

SEQ ID NO: 16446 - RNA, 21 nt, synthetic construct
  source 1..21: mol_type = other RNA
ctttaaggaaagaaggatgga

SEQ ID NO: 16447 - RNA, 21 nt, synthetic construct
  source 1..21: mol_type = other RNA
ctttcaaggacctgcccagta

SEQ ID NO: 16448 - RNA, 21 nt, synthetic construct
  source 1..21: mol_type = other RNA
ctttcacagggatgcctgtac

SEQ ID NO: 16449 - RNA, 21 nt, synthetic construct
  source 1..21: mol_type = other RNA
ctttccctttcaaggacctgc

SEQ ID NO: 16450 - RNA, 21 nt, synthetic construct
  source 1..21: mol_type = other RNA
ctttccttaaagagtccccag

SEQ ID NO: 16451 - RNA, 21 nt, synthetic construct
  source 1..21: mol_type = other RNA
ctttcgtggtttccactgagc

SEQ ID NO: 16452 - RNA, 21 nt, synthetic construct
  source 1..21: mol_type = other RNA
ctttctagtccccaatttata

SEQ ID NO: 16453 - RNA, 21 nt, synthetic construct
  source 1..21: mol_type = other RNA
ctttctccatccttctttcct

SEQ ID NO: 16454 - RNA, 21 nt, synthetic construct
  source 1..21: mol_type = other RNA
ctttctctttctccatccttc

SEQ ID NO: 16455 - RNA, 21 nt, synthetic construct
  source 1..21: mol_type = other RNA
ctttggagaggtgagggactt

SEQ ID NO: 16456 - RNA, 21 nt, synthetic construct
  source 1..21: mol_type = other RNA
ctttggctcttcacctttcta

SEQ ID NO: 16457 - RNA, 21 nt, synthetic construct
  source 1..21: mol_type = other RNA
ctttgtgagaatggtgcgtcc

SEQ ID NO: 16458 - RNA, 21 nt, synthetic construct
  source 1..21: mol_type = other RNA
cttttgggtggattctcctcc

SEQ ID NO: 16459 - RNA, 21 nt, synthetic construct
  source 1..21: mol_type = other RNA
cttttgtccccccaagttttg

SEQ ID NO: 16460 - RNA, 21 nt, synthetic construct
  source 1..21: mol_type = other RNA
gaaaaacaaaatcagaataag

SEQ ID NO: 16461 - RNA, 21 nt, synthetic construct
  source 1..21: mol_type = other RNA
gaaaacagatccagggacacg

SEQ ID NO: 16462 - RNA, 21 nt, synthetic construct
  source 1..21: mol_type = other RNA
gaaaacagggatggttggtca

SEQ ID NO: 16463 - RNA, 21 nt, synthetic construct
  source 1..21: mol_type = other RNA
gaaaactccctttgtgagaat

SEQ ID NO: 16464 - RNA, 21 nt, synthetic construct
  source 1..21: mol_type = other RNA
gaaaatgacccaacagcctct

SEQ ID NO: 16465 - RNA, 21 nt, synthetic construct
  source 1..21: mol_type = other RNA
gaaacacagccccaggtggag

SEQ ID NO: 16466 - RNA, 21 nt, synthetic construct
  source 1..21: mol_type = other RNA
gaaaccaccccagcagatact

SEQ ID NO: 16467 - RNA, 21 nt, synthetic construct
  source 1..21: mol_type = other RNA
gaaaccacgaaaggactcctg

SEQ ID NO: 16468 - RNA, 21 nt, synthetic construct
  source 1..21: mol_type = other RNA
gaaaccctcagtcctaggaaa

SEQ ID NO: 16469 - RNA, 21 nt, synthetic construct
  source 1..21: mol_type = other RNA
gaaacgcaccagacggccgcg

SEQ ID NO: 16470 - RNA, 21 nt, synthetic construct
  source 1..21: mol_type = other RNA
gaaacggtggcccgtgtcagc

SEQ ID NO: 16471 - RNA, 21 nt, synthetic construct
  source 1..21: mol_type = other RNA
gaaactcgggctgtgaagggg

SEQ ID NO: 16472 - RNA, 21 nt, synthetic construct
  source 1..21: mol_type = other RNA
gaaactggccgggaatcaaga

SEQ ID NO: 16473 - RNA, 21 nt, synthetic construct
  source 1..21: mol_type = other RNA
gaaagaaggatggagaaagag

SEQ ID NO: 16474 - RNA, 21 nt, synthetic construct
  source 1..21: mol_type = other RNA
gaaagagaaagggagtagagg

SEQ ID NO: 16475 - RNA, 21 nt, synthetic construct
  source 1..21: mol_type = other RNA
gaaagatgcctgaggcctggg

SEQ ID NO: 16476 - RNA, 21 nt, synthetic construct
  source 1..21: mol_type = other RNA
gaaaggactcctggctatctg

SEQ ID NO: 16477 - RNA, 21 nt, synthetic construct
  source 1..21: mol_type = other RNA
gaaaggcccattgctctcctt

SEQ ID NO: 16478 - RNA, 21 nt, synthetic construct
  source 1..21: mol_type = other RNA
gaaagggaaaggcccattgct

SEQ ID NO: 16479 - RNA, 21 nt, synthetic construct
  source 1..21: mol_type = other RNA
gaaagggagtagaggcggcca

SEQ ID NO: 16480 - RNA, 21 nt, synthetic construct
  source 1..21: mol_type = other RNA
gaaaggtgaagagccaaagtt

SEQ ID NO: 16481 - RNA, 21 nt, synthetic construct
  source 1..21: mol_type = other RNA
gaaataaacgagccgagttca

SEQ ID NO: 16482 - RNA, 21 nt, synthetic construct
  source 1..21: mol_type = other RNA
gaacaatataaattggggact

SEQ ID NO: 16483 - RNA, 21 nt, synthetic construct
  source 1..21: mol_type = other RNA
gaacacctaggacgcaccatt

SEQ ID NO: 16484 - RNA, 21 nt, synthetic construct
  source 1..21: mol_type = other RNA
gaacagagaagagctgggggc

SEQ ID NO: 16485 - RNA, 21 nt, synthetic construct
  source 1..21: mol_type = other RNA
gaacagccacagcaggggggc

SEQ ID NO: 16486 - RNA, 21 nt, synthetic construct
  source 1..21: mol_type = other RNA
gaaccccacatggtacctgtt

SEQ ID NO: 16487 - RNA, 21 nt, synthetic construct
  source 1..21: mol_type = other RNA
gaaccccagcccaccccaatg

SEQ ID NO: 16488 - RNA, 21 nt, synthetic construct
  source 1..21: mol_type = other RNA
gaacccctgtagggaaggggc

SEQ ID NO: 16489 - RNA, 21 nt, synthetic construct
  source 1..21: mol_type = other RNA
gaacctcttccctagtctgag

SEQ ID NO: 16490 - RNA, 21 nt, synthetic construct
  source 1..21: mol_type = other RNA
gaacctgagctgctctgacgc

SEQ ID NO: 16491 - RNA, 21 nt, synthetic construct
  source 1..21: mol_type = other RNA
gaacgaagccgtgggcccagg

SEQ ID NO: 16492 - RNA, 21 nt, synthetic construct
  source 1..21: mol_type = other RNA
gaacgggatgaactcggctcg

SEQ ID NO: 16493 - RNA, 21 nt, synthetic construct
  source 1..21: mol_type = other RNA
gaacggggaagggagggggct

SEQ ID NO: 16494 - RNA, 21 nt, synthetic construct
  source 1..21: mol_type = other RNA
gaacggggatgcaggggaacg

SEQ ID NO: 16495 - RNA, 21 nt, synthetic construct
  source 1..21: mol_type = other RNA
gaacggggctcagtctgaaga

SEQ ID NO: 16496 - RNA, 21 nt, synthetic construct
  source 1..21: mol_type = other RNA
gaactcaggaccaacttattc

SEQ ID NO: 16497 - RNA, 21 nt, synthetic construct
  source 1..21: mol_type = other RNA
gaactcggctcgtttatttcc

SEQ ID NO: 16498 - RNA, 21 nt, synthetic construct
  source 1..21: mol_type = other RNA
gaactggagctgaggaaggag

SEQ ID NO: 16499 - RNA, 21 nt, synthetic construct
  source 1..21: mol_type = other RNA
gaactggagtgtgacagcctg

SEQ ID NO: 16500 - RNA, 21 nt, synthetic construct
  source 1..21: mol_type = other RNA
gaacttgggaacagccacagc

SEQ ID NO: 16501 - RNA, 21 nt, synthetic construct
  source 1..21: mol_type = other RNA
gaagaatgagaaacggtggcc

SEQ ID NO: 16502 - RNA, 21 nt, synthetic construct
  source 1..21: mol_type = other RNA
gaagagcagagccaggaaccc

SEQ ID NO: 16503 - RNA, 21 nt, synthetic construct
  source 1..21: mol_type = other RNA
gaagagccaaagttagaactc

SEQ ID NO: 16504 - RNA, 21 nt, synthetic construct
  source 1..21: mol_type = other RNA
gaagagctgggggcctgggct

SEQ ID NO: 16505 - RNA, 21 nt, synthetic construct
  source 1..21: mol_type = other RNA
gaagaggttccagcccctcct

SEQ ID NO: 16506 - RNA, 21 nt, synthetic construct
  source 1..21: mol_type = other RNA
gaagagtgagtttgccaagca

SEQ ID NO: 16507 - RNA, 21 nt, synthetic construct
  source 1..21: mol_type = other RNA
gaagcaggggagctgggtttg

SEQ ID NO: 16508 - RNA, 21 nt, synthetic construct
  source 1..21: mol_type = other RNA
gaagcagtttggaaaaacaaa

SEQ ID NO: 16509 - RNA, 21 nt, synthetic construct
  source 1..21: mol_type = other RNA
gaagcccagagcagggcctta

SEQ ID NO: 16510 - RNA, 21 nt, synthetic construct
  source 1..21: mol_type = other RNA
gaagccccctcccttccccgt

SEQ ID NO: 16511 - RNA, 21 nt, synthetic construct
  source 1..21: mol_type = other RNA
gaagccgtgggcccagggcta

SEQ ID NO: 16512 - RNA, 21 nt, synthetic construct
  source 1..21: mol_type = other RNA
gaagcctgagcgcctctcctg

SEQ ID NO: 16513 - RNA, 21 nt, synthetic construct
  source 1..21: mol_type = other RNA
gaagcgccacctgtgggtggt

SEQ ID NO: 16514 - RNA, 21 nt, synthetic construct
  source 1..21: mol_type = other RNA
gaagcgggaccctgctctggg

SEQ ID NO: 16515 - RNA, 21 nt, synthetic construct
  source 1..21: mol_type = other RNA
gaagctaaactcctagatcca

SEQ ID NO: 16516 - RNA, 21 nt, synthetic construct
  source 1..21: mol_type = other RNA
gaagctgcagcaccaggatca

SEQ ID NO: 16517 - RNA, 21 nt, synthetic construct
  source 1..21: mol_type = other RNA
gaaggacctggctgggtttaa

SEQ ID NO: 16518 - RNA, 21 nt, synthetic construct
  source 1..21: mol_type = other RNA
gaaggaggaggggctggaacc

SEQ ID NO: 16519 - RNA, 21 nt, synthetic construct
  source 1..21: mol_type = other RNA
gaaggagtccaggcccccagc

SEQ ID NO: 16520 - RNA, 21 nt, synthetic construct
  source 1..21: mol_type = other RNA
gaaggagtgaagctaaactcc

SEQ ID NO: 16521 - RNA, 21 nt, synthetic construct
  source 1..21: mol_type = other RNA
gaaggatgcaggacgagaaac

SEQ ID NO: 16522 - RNA, 21 nt, synthetic construct
  source 1..21: mol_type = other RNA
gaaggatggagaaagagaaag

SEQ ID NO: 16523 - RNA, 21 nt, synthetic construct
  source 1..21: mol_type = other RNA
gaaggccaccctgtgctggga

SEQ ID NO: 16524 - RNA, 21 nt, synthetic construct
  source 1..21: mol_type = other RNA
gaaggcctggccggcctgacc

SEQ ID NO: 16525 - RNA, 21 nt, synthetic construct
  source 1..21: mol_type = other RNA
gaagggaatccctcctctctg

SEQ ID NO: 16526 - RNA, 21 nt, synthetic construct
  source 1..21: mol_type = other RNA
gaagggagggggcttctcatc

SEQ ID NO: 16527 - RNA, 21 nt, synthetic construct
  source 1..21: mol_type = other RNA
gaagggctggggcctggcctc

SEQ ID NO: 16528 - RNA, 21 nt, synthetic construct
  source 1..21: mol_type = other RNA
gaaggggcaggagagccaggg

SEQ ID NO: 16529 - RNA, 21 nt, synthetic construct
  source 1..21: mol_type = other RNA
gaaggggccgcacgtgccctg

SEQ ID NO: 16530 - RNA, 21 nt, synthetic construct
  source 1..21: mol_type = other RNA
gaagggggacagggaagcctg

SEQ ID NO: 16531 - RNA, 21 nt, synthetic construct
  source 1..21: mol_type = other RNA
gaagggggatgcaggggaacg

SEQ ID NO: 16532 - RNA, 21 nt, synthetic construct
  source 1..21: mol_type = other RNA
gaagtccagggggtcggagga

SEQ ID NO: 16533 - RNA, 21 nt, synthetic construct
  source 1..21: mol_type = other RNA
gaagtgaacggggaagggagg

SEQ ID NO: 16534 - RNA, 21 nt, synthetic construct
  source 1..21: mol_type = other RNA
gaagtgtaaggaagctgcagc

SEQ ID NO: 16535 - RNA, 21 nt, synthetic construct
  source 1..21: mol_type = other RNA
gaataagttggtcctgagttc

SEQ ID NO: 16536 - RNA, 21 nt, synthetic construct
  source 1..21: mol_type = other RNA
gaatatgtcccagatagcact

SEQ ID NO: 16537 - RNA, 21 nt, synthetic construct
  source 1..21: mol_type = other RNA
gaatcaagagtcacccagaga

SEQ ID NO: 16538 - RNA, 21 nt, synthetic construct
  source 1..21: mol_type = other RNA
gaatccacccaaaaggcagcc

SEQ ID NO: 16539 - RNA, 21 nt, synthetic construct
  source 1..21: mol_type = other RNA
gaatccctcctctctgaaccc

SEQ ID NO: 16540 - RNA, 21 nt, synthetic construct
  source 1..21: mol_type = other RNA
gaatcctggctccagcccctc

SEQ ID NO: 16541 - RNA, 21 nt, synthetic construct
  source 1..21: mol_type = other RNA
gaatgagaaacggtggcccgt

SEQ ID NO: 16542 - RNA, 21 nt, synthetic construct
  source 1..21: mol_type = other RNA
gaatggggagaggctgggggc

SEQ ID NO: 16543 - RNA, 21 nt, synthetic construct
  source 1..21: mol_type = other RNA
gaatggggaggggttgggcct

SEQ ID NO: 16544 - RNA, 21 nt, synthetic construct
  source 1..21: mol_type = other RNA
gaatgggggcagggtaccagc

SEQ ID NO: 16545 - RNA, 21 nt, synthetic construct
  source 1..21: mol_type = other RNA
gaatggtgcgtcctaggtgtt

SEQ ID NO: 16546 - RNA, 21 nt, synthetic construct
  source 1..21: mol_type = other RNA
gacaaaagccgaagtccaggg

SEQ ID NO: 16547 - RNA, 21 nt, synthetic construct
  source 1..21: mol_type = other RNA
gacaactgggtggaaataaac

SEQ ID NO: 16548 - RNA, 21 nt, synthetic construct
  source 1..21: mol_type = other RNA
gacacccccctcctcaccaca

SEQ ID NO: 16549 - RNA, 21 nt, synthetic construct
  source 1..21: mol_type = other RNA
gacacggcaaaacccccgtca

SEQ ID NO: 16550 - RNA, 21 nt, synthetic construct
  source 1..21: mol_type = other RNA
gacacgggccaccgtttctca

SEQ ID NO: 16551 - RNA, 21 nt, synthetic construct
  source 1..21: mol_type = other RNA
gacacggtgctaggacagtgg

SEQ ID NO: 16552 - RNA, 21 nt, synthetic construct
  source 1..21: mol_type = other RNA
gacactgggtgggctccggga

SEQ ID NO: 16553 - RNA, 21 nt, synthetic construct
  source 1..21: mol_type = other RNA
gacagactcaggggcctgggc

SEQ ID NO: 16554 - RNA, 21 nt, synthetic construct
  source 1..21: mol_type = other RNA
gacagcctagttttagcactg

SEQ ID NO: 16555 - RNA, 21 nt, synthetic construct
  source 1..21: mol_type = other RNA
gacagcctggggcccaggcac

SEQ ID NO: 16556 - RNA, 21 nt, synthetic construct
  source 1..21: mol_type = other RNA
gacagctgcacacctgtgtgc

SEQ ID NO: 16557 - RNA, 21 nt, synthetic construct
  source 1..21: mol_type = other RNA
gacagggaagcctgagcgcct

SEQ ID NO: 16558 - RNA, 21 nt, synthetic construct
  source 1..21: mol_type = other RNA
gacagggctggggtggcctct

SEQ ID NO: 16559 - RNA, 21 nt, synthetic construct
  source 1..21: mol_type = other RNA
gacagtgaccaaccatccctg

SEQ ID NO: 16560 - RNA, 21 nt, synthetic construct
  source 1..21: mol_type = other RNA
gacagtggggaaaatgaccca

SEQ ID NO: 16561 - RNA, 21 nt, synthetic construct
  source 1..21: mol_type = other RNA
gacatattcctccgcccagag

SEQ ID NO: 16562 - RNA, 21 nt, synthetic construct
  source 1..21: mol_type = other RNA
gaccaaccatccctgttttcc

SEQ ID NO: 16563 - RNA, 21 nt, synthetic construct
  source 1..21: mol_type = other RNA
gaccaacttattctgattttg

SEQ ID NO: 16564 - RNA, 21 nt, synthetic construct
  source 1..21: mol_type = other RNA
gaccactgggcaaccaggcgt

SEQ ID NO: 16565 - RNA, 21 nt, synthetic construct
  source 1..21: mol_type = other RNA
gaccagcttatgctgtttgcc

SEQ ID NO: 16566 - RNA, 21 nt, synthetic construct
  source 1..21: mol_type = other RNA
gacccaaacccagctcccctg

SEQ ID NO: 16567 - RNA, 21 nt, synthetic construct
  source 1..21: mol_type = other RNA
gacccaacagcctctggccac

SEQ ID NO: 16568 - RNA, 21 nt, synthetic construct
  source 1..21: mol_type = other RNA
gacccacgagtccaggcccca

SEQ ID NO: 16569 - RNA, 21 nt, synthetic construct
  source 1..21: mol_type = other RNA
gacccaggggtccaggcccag

SEQ ID NO: 16570 - RNA, 21 nt, synthetic construct
  source 1..21: mol_type = other RNA
gaccccacgagaggccacccc

SEQ ID NO: 16571 - RNA, 21 nt, synthetic construct
  source 1..21: mol_type = other RNA
gaccccctggacttcggcttt

SEQ ID NO: 16572 - RNA, 21 nt, synthetic construct
  source 1..21: mol_type = other RNA
gacccctaagggaagaatgag

SEQ ID NO: 16573 - RNA, 21 nt, synthetic construct
  source 1..21: mol_type = other RNA
gacccctgggtctgaatgggg

SEQ ID NO: 16574 - RNA, 21 nt, synthetic construct
  source 1..21: mol_type = other RNA
gaccctgctctgggcggagga

SEQ ID NO: 16575 - RNA, 21 nt, synthetic construct
  source 1..21: mol_type = other RNA
gacccttggaaggacctggct

SEQ ID NO: 16576 - RNA, 21 nt, synthetic construct
  source 1..21: mol_type = other RNA
gacctcatgctcttggccctc

SEQ ID NO: 16577 - RNA, 21 nt, synthetic construct
  source 1..21: mol_type = other RNA
gacctgaactggagctgagga

SEQ ID NO: 16578 - RNA, 21 nt, synthetic construct
  source 1..21: mol_type = other RNA
gacctgacccaaacccagctc

SEQ ID NO: 16579 - RNA, 21 nt, synthetic construct
  source 1..21: mol_type = other RNA
gacctgcccagtacaggcatc

SEQ ID NO: 16580 - RNA, 21 nt, synthetic construct
  source 1..21: mol_type = other RNA
gacctgcccggttctcagtgg

SEQ ID NO: 16581 - RNA, 21 nt, synthetic construct
  source 1..21: mol_type = other RNA
gacctgcctggagaaggatgc

SEQ ID NO: 16582 - RNA, 21 nt, synthetic construct
  source 1..21: mol_type = other RNA
gacctggctgggtttaaggca

SEQ ID NO: 16583 - RNA, 21 nt, synthetic construct
  source 1..21: mol_type = other RNA
gacctggtgaacacctaggac

SEQ ID NO: 16584 - RNA, 21 nt, synthetic construct
  source 1..21: mol_type = other RNA
gacgagaaacacagccccagg

SEQ ID NO: 16585 - RNA, 21 nt, synthetic construct
  source 1..21: mol_type = other RNA
gacgaggaagggggacaggga

SEQ ID NO: 16586 - RNA, 21 nt, synthetic construct
  source 1..21: mol_type = other RNA
gacgcaccattctcacaaagg

SEQ ID NO: 16587 - RNA, 21 nt, synthetic construct
  source 1..21: mol_type = other RNA
gacgcacggaggaacaatata

SEQ ID NO: 16588 - RNA, 21 nt, synthetic construct
  source 1..21: mol_type = other RNA
gacgcggccgtctggtgcgtt

SEQ ID NO: 16589 - RNA, 21 nt, synthetic construct
  source 1..21: mol_type = other RNA
gacggccgcgtcagagcagct

SEQ ID NO: 16590 - RNA, 21 nt, synthetic construct
  source 1..21: mol_type = other RNA
gacggggctggctactggcct

SEQ ID NO: 16591 - RNA, 21 nt, synthetic construct
  source 1..21: mol_type = other RNA
gacgggggttttgccgtgtct

SEQ ID NO: 16592 - RNA, 21 nt, synthetic construct
  source 1..21: mol_type = other RNA
gactagaaaggtgaagagcca

SEQ ID NO: 16593 - RNA, 21 nt, synthetic construct
  source 1..21: mol_type = other RNA
gactagggaagaggttccagc

SEQ ID NO: 16594 - RNA, 21 nt, synthetic construct
  source 1..21: mol_type = other RNA
gactcaaacccagaagcccag

SEQ ID NO: 16595 - RNA, 21 nt, synthetic construct
  source 1..21: mol_type = other RNA
gactcaggggcctgggcggga

SEQ ID NO: 16596 - RNA, 21 nt, synthetic construct
  source 1..21: mol_type = other RNA
gactccagagggagccacgaa

SEQ ID NO: 16597 - RNA, 21 nt, synthetic construct
  source 1..21: mol_type = other RNA
gactccagagtccaggcccaa

SEQ ID NO: 16598 - RNA, 21 nt, synthetic construct
  source 1..21: mol_type = other RNA
gactcccagaggggtgagaca

SEQ ID NO: 16599 - RNA, 21 nt, synthetic construct
  source 1..21: mol_type = other RNA
gactcctggctatctgcaaac

SEQ ID NO: 16600 - RNA, 21 nt, synthetic construct
  source 1..21: mol_type = other RNA
gactcctggctctgaaggagg

SEQ ID NO: 16601 - RNA, 21 nt, synthetic construct
  source 1..21: mol_type = other RNA
gactcctgggtctgagggtgg

SEQ ID NO: 16602 - RNA, 21 nt, synthetic construct
  source 1..21: mol_type = other RNA
gactccttcatctgagggcgg

SEQ ID NO: 16603 - RNA, 21 nt, synthetic construct
  source 1..21: mol_type = other RNA
gactcgtgggtctgagggagg

SEQ ID NO: 16604 - RNA, 21 nt, synthetic construct
  source 1..21: mol_type = other RNA
gactctggagtccctggtgcc

SEQ ID NO: 16605 - RNA, 21 nt, synthetic construct
  source 1..21: mol_type = other RNA
gactcttgattcccggccagt

SEQ ID NO: 16606 - RNA, 21 nt, synthetic construct
  source 1..21: mol_type = other RNA
gactctttaaggaaagaagga

SEQ ID NO: 16607 - RNA, 21 nt, synthetic construct
  source 1..21: mol_type = other RNA
gactgagccccgttcccctgc

SEQ ID NO: 16608 - RNA, 21 nt, synthetic construct
  source 1..21: mol_type = other RNA
gactgagggtttcagtgctaa

SEQ ID NO: 16609 - RNA, 21 nt, synthetic construct
  source 1..21: mol_type = other RNA
gactgcttggcaaactcactc

SEQ ID NO: 16610 - RNA, 21 nt, synthetic construct
  source 1..21: mol_type = other RNA
gactgggggcctggactcctg

SEQ ID NO: 16611 - RNA, 21 nt, synthetic construct
  source 1..21: mol_type = other RNA
gacttcggcttttgtcccccc

SEQ ID NO: 16612 - RNA, 21 nt, synthetic construct
  source 1..21: mol_type = other RNA
gacttctgggtcttagggagg

SEQ ID NO: 16613 - RNA, 21 nt, synthetic construct
  source 1..21: mol_type = other RNA
gacttgccccaggccttgtgg

SEQ ID NO: 16614 - RNA, 21 nt, synthetic construct
  source 1..21: mol_type = other RNA
gacttggggggtaatttatcc

SEQ ID NO: 16615 - RNA, 21 nt, synthetic construct
  source 1..21: mol_type = other RNA
gagaaacacagccccaggtgg

SEQ ID NO: 16616 - RNA, 21 nt, synthetic construct
  source 1..21: mol_type = other RNA
gagaaacggtggcccgtgtca

SEQ ID NO: 16617 - RNA, 21 nt, synthetic construct
  source 1..21: mol_type = other RNA
gagaaactggccgggaatcaa

SEQ ID NO: 16618 - RNA, 21 nt, synthetic construct
  source 1..21: mol_type = other RNA
gagaaagagaaagggagtaga

SEQ ID NO: 16619 - RNA, 21 nt, synthetic construct
  source 1..21: mol_type = other RNA
gagaaagggagtagaggcggc

SEQ ID NO: 16620 - RNA, 21 nt, synthetic construct
  source 1..21: mol_type = other RNA
gagaagagctgggggcctggg

SEQ ID NO: 16621 - RNA, 21 nt, synthetic construct
  source 1..21: mol_type = other RNA
gagaagcagtttggaaaaaca

SEQ ID NO: 16622 - RNA, 21 nt, synthetic construct
  source 1..21: mol_type = other RNA
gagaagccccctcccttcccc

SEQ ID NO: 16623 - RNA, 21 nt, synthetic construct
  source 1..21: mol_type = other RNA
gagaaggatgcaggacgagaa

SEQ ID NO: 16624 - RNA, 21 nt, synthetic construct
  source 1..21: mol_type = other RNA
gagaagggaatccctcctctc

SEQ ID NO: 16625 - RNA, 21 nt, synthetic construct
  source 1..21: mol_type = other RNA
gagaatccacccaaaaggcag

SEQ ID NO: 16626 - RNA, 21 nt, synthetic construct
  source 1..21: mol_type = other RNA
gagaatggtgcgtcctaggtg

SEQ ID NO: 16627 - RNA, 21 nt, synthetic construct
  source 1..21: mol_type = other RNA
gagacagctgcacacctgtgt

SEQ ID NO: 16628 - RNA, 21 nt, synthetic construct
  source 1..21: mol_type = other RNA
gagacagtgaccaaccatccc

SEQ ID NO: 16629 - RNA, 21 nt, synthetic construct
  source 1..21: mol_type = other RNA
gagagcaatgggcctttccct

SEQ ID NO: 16630 - RNA, 21 nt, synthetic construct
  source 1..21: mol_type = other RNA
gagagccaggggcatgagatg

SEQ ID NO: 16631 - RNA, 21 nt, synthetic construct
  source 1..21: mol_type = other RNA
gagaggagggattcccttctc

SEQ ID NO: 16632 - RNA, 21 nt, synthetic construct
  source 1..21: mol_type = other RNA
gagaggccaccccagccctgt

SEQ ID NO: 16633 - RNA, 21 nt, synthetic construct
  source 1..21: mol_type = other RNA
gagaggcgctcaggcttccct

SEQ ID NO: 16634 - RNA, 21 nt, synthetic construct
  source 1..21: mol_type = other RNA
gagaggctgggggcctggact

SEQ ID NO: 16635 - RNA, 21 nt, synthetic construct
  source 1..21: mol_type = other RNA
gagagggtagcgcagggtggc

SEQ ID NO: 16636 - RNA, 21 nt, synthetic construct
  source 1..21: mol_type = other RNA
gagaggtgagggacttggggg

SEQ ID NO: 16637 - RNA, 21 nt, synthetic construct
  source 1..21: mol_type = other RNA
gagataaggccagtagccagc

SEQ ID NO: 16638 - RNA, 21 nt, synthetic construct
  source 1..21: mol_type = other RNA
gagatggtggacgaggaaggg

SEQ ID NO: 16639 - RNA, 21 nt, synthetic construct
  source 1..21: mol_type = other RNA
gagcaatgggcctttcccttt

SEQ ID NO: 16640 - RNA, 21 nt, synthetic construct
  source 1..21: mol_type = other RNA
gagcactgaaggcctggccgg

SEQ ID NO: 16641 - RNA, 21 nt, synthetic construct
  source 1..21: mol_type = other RNA
gagcactggaagcgccacctg

SEQ ID NO: 16642 - RNA, 21 nt, synthetic construct
  source 1..21: mol_type = other RNA
gagcagagccaggaacccctg

SEQ ID NO: 16643 - RNA, 21 nt, synthetic construct
  source 1..21: mol_type = other RNA
gagcagctcaggttctgggag

SEQ ID NO: 16644 - RNA, 21 nt, synthetic construct
  source 1..21: mol_type = other RNA
gagcagggccttagggaagcg

SEQ ID NO: 16645 - RNA, 21 nt, synthetic construct
  source 1..21: mol_type = other RNA
gagcagggtcccgcttcccta

SEQ ID NO: 16646 - RNA, 21 nt, synthetic construct
  source 1..21: mol_type = other RNA
gagcatgaggtcatggaaact

SEQ ID NO: 16647 - RNA, 21 nt, synthetic construct
  source 1..21: mol_type = other RNA
gagcattggggtgggctgggg

SEQ ID NO: 16648 - RNA, 21 nt, synthetic construct
  source 1..21: mol_type = other RNA
gagccaaagttagaactcagg

SEQ ID NO: 16649 - RNA, 21 nt, synthetic construct
  source 1..21: mol_type = other RNA
gagccacgaaaacagatccag

SEQ ID NO: 16650 - RNA, 21 nt, synthetic construct
  source 1..21: mol_type = other RNA
gagccaggaacccctgtaggg

SEQ ID NO: 16651 - RNA, 21 nt, synthetic construct
  source 1..21: mol_type = other RNA
gagccaggagtcctggccccc

SEQ ID NO: 16652 - RNA, 21 nt, synthetic construct
  source 1..21: mol_type = other RNA
gagccaggattcttagggctg

SEQ ID NO: 16653 - RNA, 21 nt, synthetic construct
  source 1..21: mol_type = other RNA
gagccaggggcatgagatggt

SEQ ID NO: 16654 - RNA, 21 nt, synthetic construct
  source 1..21: mol_type = other RNA
gagcccacccagtgtccacaa

SEQ ID NO: 16655 - RNA, 21 nt, synthetic construct
  source 1..21: mol_type = other RNA
gagcccaggcccccagctctt

SEQ ID NO: 16656 - RNA, 21 nt, synthetic construct
  source 1..21: mol_type = other RNA
gagccccgttcccctgcatcc

SEQ ID NO: 16657 - RNA, 21 nt, synthetic construct
  source 1..21: mol_type = other RNA
gagccgagttcatcccgttcc

SEQ ID NO: 16658 - RNA, 21 nt, synthetic construct
  source 1..21: mol_type = other RNA
gagcgcctctcctgggcttgc

SEQ ID NO: 16659 - RNA, 21 nt, synthetic construct
  source 1..21: mol_type = other RNA
gagctacgagggccaagagca

SEQ ID NO: 16660 - RNA, 21 nt, synthetic construct
  source 1..21: mol_type = other RNA
gagctgaggaaggagtgaagc

SEQ ID NO: 16661 - RNA, 21 nt, synthetic construct
  source 1..21: mol_type = other RNA
gagctgctctgacgcggccgt

SEQ ID NO: 16662 - RNA, 21 nt, synthetic construct
  source 1..21: mol_type = other RNA
gagctgggggcctgggctcct

SEQ ID NO: 16663 - RNA, 21 nt, synthetic construct
  source 1..21: mol_type = other RNA
gagctgggtttgggtcaggtc

SEQ ID NO: 16664 - RNA, 21 nt, synthetic construct
  source 1..21: mol_type = other RNA
gagcttgacccttggaaggac

SEQ ID NO: 16665 - RNA, 21 nt, synthetic construct
  source 1..21: mol_type = other RNA
gaggaacaatataaattgggg

SEQ ID NO: 16666 - RNA, 21 nt, synthetic construct
  source 1..21: mol_type = other RNA
gaggaaggagtgaagctaaac

SEQ ID NO: 16667 - RNA, 21 nt, synthetic construct
  source 1..21: mol_type = other RNA
gaggaaggccaccctgtgctg

SEQ ID NO: 16668 - RNA, 21 nt, synthetic construct
  source 1..21: mol_type = other RNA
gaggaagggggacagggaagc

SEQ ID NO: 16669 - RNA, 21 nt, synthetic construct
  source 1..21: mol_type = other RNA
gaggaatatgtcccagatagc

SEQ ID NO: 16670 - RNA, 21 nt, synthetic construct
  source 1..21: mol_type = other RNA
gaggagaagcagtttggaaaa

SEQ ID NO: 16671 - RNA, 21 nt, synthetic construct
  source 1..21: mol_type = other RNA
gaggagaatccacccaaaagg

SEQ ID NO: 16672 - RNA, 21 nt, synthetic construct
  source 1..21: mol_type = other RNA
gaggaggcgggagggagctac

SEQ ID NO: 16673 - RNA, 21 nt, synthetic construct
  source 1..21: mol_type = other RNA
gaggagggacttgccccaggc

SEQ ID NO: 16674 - RNA, 21 nt, synthetic construct
  source 1..21: mol_type = other RNA
gaggagggattcccttctcag

SEQ ID NO: 16675 - RNA, 21 nt, synthetic construct
  source 1..21: mol_type = other RNA
gaggaggggctggaacctctt

SEQ ID NO: 16676 - RNA, 21 nt, synthetic construct
  source 1..21: mol_type = other RNA
gaggaggggctggggcctgga

SEQ ID NO: 16677 - RNA, 21 nt, synthetic construct
  source 1..21: mol_type = other RNA
gaggaggggggtgtccgtgtg

SEQ ID NO: 16678 - RNA, 21 nt, synthetic construct
  source 1..21: mol_type = other RNA
gaggccaccccagccctgtct

SEQ ID NO: 16679 - RNA, 21 nt, synthetic construct
  source 1..21: mol_type = other RNA
gaggccaggccccagcccttc

SEQ ID NO: 16680 - RNA, 21 nt, synthetic construct
  source 1..21: mol_type = other RNA
gaggccccaggccacctactt

SEQ ID NO: 16681 - RNA, 21 nt, synthetic construct
  source 1..21: mol_type = other RNA
gaggccccctctgcacggggc

SEQ ID NO: 16682 - RNA, 21 nt, synthetic construct
  source 1..21: mol_type = other RNA
gaggcctggagcattggggtg

SEQ ID NO: 16683 - RNA, 21 nt, synthetic construct
  source 1..21: mol_type = other RNA
gaggcctgggcaccagggact

SEQ ID NO: 16684 - RNA, 21 nt, synthetic construct
  source 1..21: mol_type = other RNA
gaggcgctcaggcttccctgt

SEQ ID NO: 16685 - RNA, 21 nt, synthetic construct
  source 1..21: mol_type = other RNA
gaggcggccacgacctggtga

SEQ ID NO: 16686 - RNA, 21 nt, synthetic construct
  source 1..21: mol_type = other RNA
gaggcgggagggagctacgag

SEQ ID NO: 16687 - RNA, 21 nt, synthetic construct
  source 1..21: mol_type = other RNA
gaggcggggctgggcctggac

SEQ ID NO: 16688 - RNA, 21 nt, synthetic construct
  source 1..21: mol_type = other RNA
gaggctgggggcctggactcc

SEQ ID NO: 16689 - RNA, 21 nt, synthetic construct
  source 1..21: mol_type = other RNA
gaggctggtaccctgccccca

SEQ ID NO: 16690 - RNA, 21 nt, synthetic construct
  source 1..21: mol_type = other RNA
gaggctgttgggtcattttcc

SEQ ID NO: 16691 - RNA, 21 nt, synthetic construct
  source 1..21: mol_type = other RNA
gagggacttgccccaggcctt

SEQ ID NO: 16692 - RNA, 21 nt, synthetic construct
  source 1..21: mol_type = other RNA
gagggacttggggggtaattt

SEQ ID NO: 16693 - RNA, 21 nt, synthetic construct
  source 1..21: mol_type = other RNA
gagggagccacgaaaacagat

SEQ ID NO: 16694 - RNA, 21 nt, synthetic construct
  source 1..21: mol_type = other RNA
gagggagctacgagggccaag

SEQ ID NO: 16695 - RNA, 21 nt, synthetic construct
  source 1..21: mol_type = other RNA
gagggaggaggggctggggcc

SEQ ID NO: 16696 - RNA, 21 nt, synthetic construct
  source 1..21: mol_type = other RNA
gagggattcccttctcaggtt

SEQ ID NO: 16697 - RNA, 21 nt, synthetic construct
  source 1..21: mol_type = other RNA
gagggccaagagcatgaggtc

SEQ ID NO: 16698 - RNA, 21 nt, synthetic construct
  source 1..21: mol_type = other RNA
gagggcggaagggctggggcc

SEQ ID NO: 16699 - RNA, 21 nt, synthetic construct
  source 1..21: mol_type = other RNA
gaggggctggaacctcttccc

SEQ ID NO: 16700 - RNA, 21 nt, synthetic construct
  source 1..21: mol_type = other RNA
gaggggctggagccaggattc

SEQ ID NO: 16701 - RNA, 21 nt, synthetic construct
  source 1..21: mol_type = other RNA
gaggggctggggcctggactc

SEQ ID NO: 16702 - RNA, 21 nt, synthetic construct
  source 1..21: mol_type = other RNA
gaggggctgggggccaggact

SEQ ID NO: 16703 - RNA, 21 nt, synthetic construct
  source 1..21: mol_type = other RNA
gagggggcctcagtgaactgg

SEQ ID NO: 16704 - RNA, 21 nt, synthetic construct
  source 1..21: mol_type = other RNA
gagggggcttctcatctgggt

SEQ ID NO: 16705 - RNA, 21 nt, synthetic construct
  source 1..21: mol_type = other RNA
gaggggggcaaggagagcaat

SEQ ID NO: 16706 - RNA, 21 nt, synthetic construct
  source 1..21: mol_type = other RNA
gaggggggtgtccgtgtggaa

SEQ ID NO: 16707 - RNA, 21 nt, synthetic construct
  source 1..21: mol_type = other RNA
gaggggtgagacagctgcaca

SEQ ID NO: 16708 - RNA, 21 nt, synthetic construct
  source 1..21: mol_type = other RNA
gaggggttgggcctggactct

SEQ ID NO: 16709 - RNA, 21 nt, synthetic construct
  source 1..21: mol_type = other RNA
gagggtagcgcagggtggcca

SEQ ID NO: 16710 - RNA, 21 nt, synthetic construct
  source 1..21: mol_type = other RNA
gagggtggagggactgggggc

SEQ ID NO: 16711 - RNA, 21 nt, synthetic construct
  source 1..21: mol_type = other RNA
gagggtttcagtgctaaaact

SEQ ID NO: 16712 - RNA, 21 nt, synthetic construct
  source 1..21: mol_type = other RNA
gaggtcatggaaactcgggct

SEQ ID NO: 16713 - RNA, 21 nt, synthetic construct
  source 1..21: mol_type = other RNA
gaggtgagggacttggggggt

SEQ ID NO: 16714 - RNA, 21 nt, synthetic construct
  source 1..21: mol_type = other RNA
gaggttccagcccctcctcct

SEQ ID NO: 16715 - RNA, 21 nt, synthetic construct
  source 1..21: mol_type = other RNA
gagtagaggcggccacgacct

SEQ ID NO: 16716 - RNA, 21 nt, synthetic construct
  source 1..21: mol_type = other RNA
gagtaggaggggctggagcca

SEQ ID NO: 16717 - RNA, 21 nt, synthetic construct
  source 1..21: mol_type = other RNA
gagtatctgctggggtggttt

SEQ ID NO: 16718 - RNA, 21 nt, synthetic construct
  source 1..21: mol_type = other RNA
gagtcacccagagacagtgac

SEQ ID NO: 16719 - RNA, 21 nt, synthetic construct
  source 1..21: mol_type = other RNA
gagtccaggcccaacccctcc

SEQ ID NO: 16720 - RNA, 21 nt, synthetic construct
  source 1..21: mol_type = other RNA
gagtccaggcccccagcctct

SEQ ID NO: 16721 - RNA, 21 nt, synthetic construct
  source 1..21: mol_type = other RNA
gagtccaggcccccagtccct

SEQ ID NO: 16722 - RNA, 21 nt, synthetic construct
  source 1..21: mol_type = other RNA
gagtccccagtgctatctggg

SEQ ID NO: 16723 - RNA, 21 nt, synthetic construct
  source 1..21: mol_type = other RNA
gagtcccgacttgctgggaca

SEQ ID NO: 16724 - RNA, 21 nt, synthetic construct
  source 1..21: mol_type = other RNA
gagtcccgcccaggcccctga

SEQ ID NO: 16725 - RNA, 21 nt, synthetic construct
  source 1..21: mol_type = other RNA
gagtccctggtgcccaggcct

SEQ ID NO: 16726 - RNA, 21 nt, synthetic construct
  source 1..21: mol_type = other RNA
gagtcctggcccccagcccct

SEQ ID NO: 16727 - RNA, 21 nt, synthetic construct
  source 1..21: mol_type = other RNA
gagtccttggcaagcccagga

SEQ ID NO: 16728 - RNA, 21 nt, synthetic construct
  source 1..21: mol_type = other RNA
gagtcctttcgtggtttccac

SEQ ID NO: 16729 - RNA, 21 nt, synthetic construct
  source 1..21: mol_type = other RNA
gagtctgtcccagcacagggt

SEQ ID NO: 16730 - RNA, 21 nt, synthetic construct
  source 1..21: mol_type = other RNA
gagtgaagctaaactcctaga

SEQ ID NO: 16731 - RNA, 21 nt, synthetic construct
  source 1..21: mol_type = other RNA
gagtgagtttgccaagcagtc

SEQ ID NO: 16732 - RNA, 21 nt, synthetic construct
  source 1..21: mol_type = other RNA
gagtgtgacagcctggggccc

SEQ ID NO: 16733 - RNA, 21 nt, synthetic construct
  source 1..21: mol_type = other RNA
gagttcatcccgttcccaggg

SEQ ID NO: 16734 - RNA, 21 nt, synthetic construct
  source 1..21: mol_type = other RNA
gagttctaactttggctcttc

SEQ ID NO: 16735 - RNA, 21 nt, synthetic construct
  source 1..21: mol_type = other RNA
gagtttagcttcactccttcc

SEQ ID NO: 16736 - RNA, 21 nt, synthetic construct
  source 1..21: mol_type = other RNA
gagtttccatgacctcatgct

SEQ ID NO: 16737 - RNA, 21 nt, synthetic construct
  source 1..21: mol_type = other RNA
gagtttgccaagcagtcaccc

SEQ ID NO: 16738 - RNA, 21 nt, synthetic construct
  source 1..21: mol_type = other RNA
gagttttccacacggacaccc

SEQ ID NO: 16739 - RNA, 21 nt, synthetic construct
  source 1..21: mol_type = other RNA
gataaacccacgtggggtacc

SEQ ID NO: 16740 - RNA, 21 nt, synthetic construct
  source 1..21: mol_type = other RNA
gataaattaccccccaagtcc

SEQ ID NO: 16741 - RNA, 21 nt, synthetic construct
  source 1..21: mol_type = other RNA
gataaggccagtagccagccc

SEQ ID NO: 16742 - RNA, 21 nt, synthetic construct
  source 1..21: mol_type = other RNA
gataccccgaagagtgagttt

SEQ ID NO: 16743 - RNA, 21 nt, synthetic construct
  source 1..21: mol_type = other RNA
gatacgcctggttgcccagtg

SEQ ID NO: 16744 - RNA, 21 nt, synthetic construct
  source 1..21: mol_type = other RNA
gatactctgcaggaacgaagc

SEQ ID NO: 16745 - RNA, 21 nt, synthetic construct
  source 1..21: mol_type = other RNA
gatagcactggggactcttta

SEQ ID NO: 16746 - RNA, 21 nt, synthetic construct
  source 1..21: mol_type = other RNA
gatagccaggagtcctttcgt

SEQ ID NO: 16747 - RNA, 21 nt, synthetic construct
  source 1..21: mol_type = other RNA
gataggggaggggggcaagga

SEQ ID NO: 16748 - RNA, 21 nt, synthetic construct
  source 1..21: mol_type = other RNA
gatcagtgaaacgcaccagac

SEQ ID NO: 16749 - RNA, 21 nt, synthetic construct
  source 1..21: mol_type = other RNA
gatccacgggataaattaccc

SEQ ID NO: 16750 - RNA, 21 nt, synthetic construct
  source 1..21: mol_type = other RNA
gatccagggacacggtgctag

SEQ ID NO: 16751 - RNA, 21 nt, synthetic construct
  source 1..21: mol_type = other RNA
gatcctggtgctgcagcttcc

SEQ ID NO: 16752 - RNA, 21 nt, synthetic construct
  source 1..21: mol_type = other RNA
gatctaggagtttagcttcac

SEQ ID NO: 16753 - RNA, 21 nt, synthetic construct
  source 1..21: mol_type = other RNA
gatctgttttcgtggctccct

SEQ ID NO: 16754 - RNA, 21 nt, synthetic construct
  source 1..21: mol_type = other RNA
gatgaactcggctcgtttatt

SEQ ID NO: 16755 - RNA, 21 nt, synthetic construct
  source 1..21: mol_type = other RNA
gatgaaggagtccaggccccc

SEQ ID NO: 16756 - RNA, 21 nt, synthetic construct
  source 1..21: mol_type = other RNA
gatgagaagccccctcccttc

SEQ ID NO: 16757 - RNA, 21 nt, synthetic construct
  source 1..21: mol_type = other RNA
gatgcaggacgagaaacacag

SEQ ID NO: 16758 - RNA, 21 nt, synthetic construct
  source 1..21: mol_type = other RNA
gatgcaggggaacggggatgc

SEQ ID NO: 16759 - RNA, 21 nt, synthetic construct
  source 1..21: mol_type = other RNA
gatgcaggggaacggggctca

SEQ ID NO: 16760 - RNA, 21 nt, synthetic construct
  source 1..21: mol_type = other RNA
gatgcaggggaagggggatgc

SEQ ID NO: 16761 - RNA, 21 nt, synthetic construct
  source 1..21: mol_type = other RNA
gatgcctgaggcctgggcacc

SEQ ID NO: 16762 - RNA, 21 nt, synthetic construct
  source 1..21: mol_type = other RNA
gatgcctgtactgggcaggtc

SEQ ID NO: 16763 - RNA, 21 nt, synthetic construct
  source 1..21: mol_type = other RNA
gatgcgtgacctgcccggttc

SEQ ID NO: 16764 - RNA, 21 nt, synthetic construct
  source 1..21: mol_type = other RNA
gatgcttggggacctgcctgg

SEQ ID NO: 16765 - RNA, 21 nt, synthetic construct
  source 1..21: mol_type = other RNA
gatggagaaagagaaagggag

SEQ ID NO: 16766 - RNA, 21 nt, synthetic construct
  source 1..21: mol_type = other RNA
gatgggcagctttggagaggt

SEQ ID NO: 16767 - RNA, 21 nt, synthetic construct
  source 1..21: mol_type = other RNA
gatggtggacgaggaaggggg

SEQ ID NO: 16768 - RNA, 21 nt, synthetic construct
  source 1..21: mol_type = other RNA
gatggttggtcactgtctctg

SEQ ID NO: 16769 - RNA, 21 nt, synthetic construct
  source 1..21: mol_type = other RNA
gattcccggccagtttctcca

SEQ ID NO: 16770 - RNA, 21 nt, synthetic construct
  source 1..21: mol_type = other RNA
gattcccttctcaggttacgt

SEQ ID NO: 16771 - RNA, 21 nt, synthetic construct
  source 1..21: mol_type = other RNA
gattctcctccaactgtgggg

SEQ ID NO: 16772 - RNA, 21 nt, synthetic construct
  source 1..21: mol_type = other RNA
gattcttagggctgaacagag

SEQ ID NO: 16773 - RNA, 21 nt, synthetic construct
  source 1..21: mol_type = other RNA
gattttgtttttccaaactgc

SEQ ID NO: 16774 - RNA, 21 nt, synthetic construct
  source 1..21: mol_type = other RNA
gcaaaacccccgtcaccaccc

SEQ ID NO: 16775 - RNA, 21 nt, synthetic construct
  source 1..21: mol_type = other RNA
gcaaacagcataagctggtca

SEQ ID NO: 16776 - RNA, 21 nt, synthetic construct
  source 1..21: mol_type = other RNA
gcaaacaggaagtgaacgggg

SEQ ID NO: 16777 - RNA, 21 nt, synthetic construct
  source 1..21: mol_type = other RNA
gcaaactcactcttcggggta

SEQ ID NO: 16778 - RNA, 21 nt, synthetic construct
  source 1..21: mol_type = other RNA
gcaaccaggcgtatcttaaac

SEQ ID NO: 16779 - RNA, 21 nt, synthetic construct
  source 1..21: mol_type = other RNA
gcaagcccaggagaggcgctc

SEQ ID NO: 16780 - RNA, 21 nt, synthetic construct
  source 1..21: mol_type = other RNA
gcaaggagagcaatgggcctt

SEQ ID NO: 16781 - RNA, 21 nt, synthetic construct
  source 1..21: mol_type = other RNA
gcaagtccctcctccgacccc

SEQ ID NO: 16782 - RNA, 21 nt, synthetic construct
  source 1..21: mol_type = other RNA
gcaagtcgggactccagaggg

SEQ ID NO: 16783 - RNA, 21 nt, synthetic construct
  source 1..21: mol_type = other RNA
gcaatgggcctttccctttca

SEQ ID NO: 16784 - RNA, 21 nt, synthetic construct
  source 1..21: mol_type = other RNA
gcaattggggtgcaggaatgg

SEQ ID NO: 16785 - RNA, 21 nt, synthetic construct
  source 1..21: mol_type = other RNA
gcacacaggtgtgcagctgtc

SEQ ID NO: 16786 - RNA, 21 nt, synthetic construct
  source 1..21: mol_type = other RNA
gcacacctgtgtgcctgggcc

SEQ ID NO: 16787 - RNA, 21 nt, synthetic construct
  source 1..21: mol_type = other RNA
gcacagggtggccttcctcca

SEQ ID NO: 16788 - RNA, 21 nt, synthetic construct
  source 1..21: mol_type = other RNA
gcaccagacggccgcgtcaga

SEQ ID NO: 16789 - RNA, 21 nt, synthetic construct
  source 1..21: mol_type = other RNA
gcaccaggatcagtgaaacgc

SEQ ID NO: 16790 - RNA, 21 nt, synthetic construct
  source 1..21: mol_type = other RNA
gcaccagggactccagagtcc

SEQ ID NO: 16791 - RNA, 21 nt, synthetic construct
  source 1..21: mol_type = other RNA
gcaccattctcacaaagggag

SEQ ID NO: 16792 - RNA, 21 nt, synthetic construct
  source 1..21: mol_type = other RNA
gcacccagatgagaagccccc

SEQ ID NO: 16793 - RNA, 21 nt, synthetic construct
  source 1..21: mol_type = other RNA
gcaccccaattgccttagtgg

SEQ ID NO: 16794 - RNA, 21 nt, synthetic construct
  source 1..21: mol_type = other RNA
gcaccgtgtccctggatctgt

SEQ ID NO: 16795 - RNA, 21 nt, synthetic construct
  source 1..21: mol_type = other RNA
gcacggaggaacaatataaat

SEQ ID NO: 16796 - RNA, 21 nt, synthetic construct
  source 1..21: mol_type = other RNA
gcacggggccctgcagccagg

SEQ ID NO: 16797 - RNA, 21 nt, synthetic construct
  source 1..21: mol_type = other RNA
gcacgtgccctgggaacggga

SEQ ID NO: 16798 - RNA, 21 nt, synthetic construct
  source 1..21: mol_type = other RNA
gcacgtgcggccccttcacag

SEQ ID NO: 16799 - RNA, 21 nt, synthetic construct
  source 1..21: mol_type = other RNA
gcactgaaaccctcagtccta

SEQ ID NO: 16800 - RNA, 21 nt, synthetic construct
  source 1..21: mol_type = other RNA
gcactgaaggcctggccggcc

SEQ ID NO: 16801 - RNA, 21 nt, synthetic construct
  source 1..21: mol_type = other RNA
gcactggaagcgccacctgtg

SEQ ID NO: 16802 - RNA, 21 nt, synthetic construct
  source 1..21: mol_type = other RNA
gcactggggactctttaagga

SEQ ID NO: 16803 - RNA, 21 nt, synthetic construct
  source 1..21: mol_type = other RNA
gcagagccaggaacccctgta

SEQ ID NO: 16804 - RNA, 21 nt, synthetic construct
  source 1..21: mol_type = other RNA
gcagagggggcctcagtgaac

SEQ ID NO: 16805 - RNA, 21 nt, synthetic construct
  source 1..21: mol_type = other RNA
gcagagtatctgctggggtgg

SEQ ID NO: 16806 - RNA, 21 nt, synthetic construct
  source 1..21: mol_type = other RNA
gcagatactctgcaggaacga

SEQ ID NO: 16807 - RNA, 21 nt, synthetic construct
  source 1..21: mol_type = other RNA
gcagatagccaggagtccttt

SEQ ID NO: 16808 - RNA, 21 nt, synthetic construct
  source 1..21: mol_type = other RNA
gcagcaccaggatcagtgaaa

SEQ ID NO: 16809 - RNA, 21 nt, synthetic construct
  source 1..21: mol_type = other RNA
gcagccaggggctgacacggg

SEQ ID NO: 16810 - RNA, 21 nt, synthetic construct
  source 1..21: mol_type = other RNA
gcagcctggtagacagggctg

SEQ ID NO: 16811 - RNA, 21 nt, synthetic construct
  source 1..21: mol_type = other RNA
gcagctcaggttctgggagag

SEQ ID NO: 16812 - RNA, 21 nt, synthetic construct
  source 1..21: mol_type = other RNA
gcagctgtctcacccctctgg

SEQ ID NO: 16813 - RNA, 21 nt, synthetic construct
  source 1..21: mol_type = other RNA
gcagcttccttacacttccca

SEQ ID NO: 16814 - RNA, 21 nt, synthetic construct
  source 1..21: mol_type = other RNA
gcagctttggagaggtgaggg

SEQ ID NO: 16815 - RNA, 21 nt, synthetic construct
  source 1..21: mol_type = other RNA
gcaggaacgaagccgtgggcc

SEQ ID NO: 16816 - RNA, 21 nt, synthetic construct
  source 1..21: mol_type = other RNA
gcaggaatgggggcagggtac

SEQ ID NO: 16817 - RNA, 21 nt, synthetic construct
  source 1..21: mol_type = other RNA
gcaggacgagaaacacagccc

SEQ ID NO: 16818 - RNA, 21 nt, synthetic construct
  source 1..21: mol_type = other RNA
gcaggagagccaggggcatga

SEQ ID NO: 16819 - RNA, 21 nt, synthetic construct
  source 1..21: mol_type = other RNA
gcaggaggggctgggggccag

SEQ ID NO: 16820 - RNA, 21 nt, synthetic construct
  source 1..21: mol_type = other RNA
gcagggccccgtgcagagggg

SEQ ID NO: 16821 - RNA, 21 nt, synthetic construct
  source 1..21: mol_type = other RNA
gcagggccttagggaagcggg

SEQ ID NO: 16822 - RNA, 21 nt, synthetic construct
  source 1..21: mol_type = other RNA
gcagggctgtggtgaggaggg

SEQ ID NO: 16823 - RNA, 21 nt, synthetic construct
  source 1..21: mol_type = other RNA
gcaggggaacggggatgcagg

SEQ ID NO: 16824 - RNA, 21 nt, synthetic construct
  source 1..21: mol_type = other RNA
gcaggggaacggggctcagtc

SEQ ID NO: 16825 - RNA, 21 nt, synthetic construct
  source 1..21: mol_type = other RNA
gcaggggaagggggatgcagg

SEQ ID NO: 16826 - RNA, 21 nt, synthetic construct
  source 1..21: mol_type = other RNA
gcaggggagctgggtttgggt

SEQ ID NO: 16827 - RNA, 21 nt, synthetic construct
  source 1..21: mol_type = other RNA
gcaggggggcgatgcttgggg

SEQ ID NO: 16828 - RNA, 21 nt, synthetic construct
  source 1..21: mol_type = other RNA
gcagggtaccagcctcaccaa

SEQ ID NO: 16829 - RNA, 21 nt, synthetic construct
  source 1..21: mol_type = other RNA
gcagggtcccgcttccctaag

SEQ ID NO: 16830 - RNA, 21 nt, synthetic construct
  source 1..21: mol_type = other RNA
gcagggtggaggaaggccacc

SEQ ID NO: 16831 - RNA, 21 nt, synthetic construct
  source 1..21: mol_type = other RNA
gcagggtggccactgagaacc

SEQ ID NO: 16832 - RNA, 21 nt, synthetic construct
  source 1..21: mol_type = other RNA
gcaggtccccaagcatcgccc

SEQ ID NO: 16833 - RNA, 21 nt, synthetic construct
  source 1..21: mol_type = other RNA
gcaggtccttgaaagggaaag

SEQ ID NO: 16834 - RNA, 21 nt, synthetic construct
  source 1..21: mol_type = other RNA
gcagtcaccccacagttggag

SEQ ID NO: 16835 - RNA, 21 nt, synthetic construct
  source 1..21: mol_type = other RNA
gcagtttggaaaaacaaaatc

SEQ ID NO: 16836 - RNA, 21 nt, synthetic construct
  source 1..21: mol_type = other RNA
gcataagctggtcaccccaca

SEQ ID NO: 16837 - RNA, 21 nt, synthetic construct
  source 1..21: mol_type = other RNA
gcatagccctgggcccacggc

SEQ ID NO: 16838 - RNA, 21 nt, synthetic construct
  source 1..21: mol_type = other RNA
gcatcccccagaggccccagg

SEQ ID NO: 16839 - RNA, 21 nt, synthetic construct
  source 1..21: mol_type = other RNA
gcatcccccttcccctgcatc

SEQ ID NO: 16840 - RNA, 21 nt, synthetic construct
  source 1..21: mol_type = other RNA
gcatccccgttcccctgcatc

SEQ ID NO: 16841 - RNA, 21 nt, synthetic construct
  source 1..21: mol_type = other RNA
gcatccctgtgaaagatgcct

SEQ ID NO: 16842 - RNA, 21 nt, synthetic construct
  source 1..21: mol_type = other RNA
gcatccttctccaggcaggtc

SEQ ID NO: 16843 - RNA, 21 nt, synthetic construct
  source 1..21: mol_type = other RNA
gcatcgcccccctgctgtggc

SEQ ID NO: 16844 - RNA, 21 nt, synthetic construct
  source 1..21: mol_type = other RNA
gcatctttcacagggatgcct

SEQ ID NO: 16845 - RNA, 21 nt, synthetic construct
  source 1..21: mol_type = other RNA
gcatgagatggtggacgagga

SEQ ID NO: 16846 - RNA, 21 nt, synthetic construct
  source 1..21: mol_type = other RNA
gcatgaggtcatggaaactcg

SEQ ID NO: 16847 - RNA, 21 nt, synthetic construct
  source 1..21: mol_type = other RNA
gcattggggtgggctggggtt

SEQ ID NO: 16848 - RNA, 21 nt, synthetic construct
  source 1..21: mol_type = other RNA
gccaaagttagaactcaggac

SEQ ID NO: 16849 - RNA, 21 nt, synthetic construct
  source 1..21: mol_type = other RNA
gccaagaagcaggggagctgg

SEQ ID NO: 16850 - RNA, 21 nt, synthetic construct
  source 1..21: mol_type = other RNA
gccaagagcatgaggtcatgg

SEQ ID NO: 16851 - RNA, 21 nt, synthetic construct
  source 1..21: mol_type = other RNA
gccaagcagtcaccccacagt

SEQ ID NO: 16852 - RNA, 21 nt, synthetic construct
  source 1..21: mol_type = other RNA
gccaaggactcaaacccagaa

SEQ ID NO: 16853 - RNA, 21 nt, synthetic construct
  source 1..21: mol_type = other RNA
gccaagtaggtggcctggggc

SEQ ID NO: 16854 - RNA, 21 nt, synthetic construct
  source 1..21: mol_type = other RNA
gccacagcaggggggcgatgc

SEQ ID NO: 16855 - RNA, 21 nt, synthetic construct
  source 1..21: mol_type = other RNA
gccaccccagccctgtctacc

SEQ ID NO: 16856 - RNA, 21 nt, synthetic construct
  source 1..21: mol_type = other RNA
gccaccctgcgctaccctctc

SEQ ID NO: 16857 - RNA, 21 nt, synthetic construct
  source 1..21: mol_type = other RNA
gccaccctgtgctgggacaga

SEQ ID NO: 16858 - RNA, 21 nt, synthetic construct
  source 1..21: mol_type = other RNA
gccaccgtttctcattcttcc

SEQ ID NO: 16859 - RNA, 21 nt, synthetic construct
  source 1..21: mol_type = other RNA
gccacctacttggcctggacc

SEQ ID NO: 16860 - RNA, 21 nt, synthetic construct
  source 1..21: mol_type = other RNA
gccacctgtgggtggtgacgg

SEQ ID NO: 16861 - RNA, 21 nt, synthetic construct
  source 1..21: mol_type = other RNA
gccacgaaaacagatccaggg

SEQ ID NO: 16862 - RNA, 21 nt, synthetic construct
  source 1..21: mol_type = other RNA
gccacgacctggtgaacacct

SEQ ID NO: 16863 - RNA, 21 nt, synthetic construct
  source 1..21: mol_type = other RNA
gccacggtgtcccagcaagtc

SEQ ID NO: 16864 - RNA, 21 nt, synthetic construct
  source 1..21: mol_type = other RNA
gccacgtaacctgagaaggga

SEQ ID NO: 16865 - RNA, 21 nt, synthetic construct
  source 1..21: mol_type = other RNA
gccactaaggcaattggggtg

SEQ ID NO: 16866 - RNA, 21 nt, synthetic construct
  source 1..21: mol_type = other RNA
gccactgagaaccgggcaggt

SEQ ID NO: 16867 - RNA, 21 nt, synthetic construct
  source 1..21: mol_type = other RNA
gccactggctgtttaagatac

SEQ ID NO: 16868 - RNA, 21 nt, synthetic construct
  source 1..21: mol_type = other RNA
gccagaggctgttgggtcatt

SEQ ID NO: 16869 - RNA, 21 nt, synthetic construct
  source 1..21: mol_type = other RNA
gccagccccgtcctggcaggg

SEQ ID NO: 16870 - RNA, 21 nt, synthetic construct
  source 1..21: mol_type = other RNA
gccaggaacccctgtagggaa

SEQ ID NO: 16871 - RNA, 21 nt, synthetic construct
  source 1..21: mol_type = other RNA
gccaggacggggctggctact

SEQ ID NO: 16872 - RNA, 21 nt, synthetic construct
  source 1..21: mol_type = other RNA
gccaggactcctggctctgaa

SEQ ID NO: 16873 - RNA, 21 nt, synthetic construct
  source 1..21: mol_type = other RNA
gccaggagtcctggcccccag

SEQ ID NO: 16874 - RNA, 21 nt, synthetic construct
  source 1..21: mol_type = other RNA
gccaggagtcctttcgtggtt

SEQ ID NO: 16875 - RNA, 21 nt, synthetic construct
  source 1..21: mol_type = other RNA
gccaggattcttagggctgaa

SEQ ID NO: 16876 - RNA, 21 nt, synthetic construct
  source 1..21: mol_type = other RNA
gccaggccccagcccttccgc

SEQ ID NO: 16877 - RNA, 21 nt, synthetic construct
  source 1..21: mol_type = other RNA
gccaggccttcagtgctcagt

SEQ ID NO: 16878 - RNA, 21 nt, synthetic construct
  source 1..21: mol_type = other RNA
gccaggggcatgagatggtgg

SEQ ID NO: 16879 - RNA, 21 nt, synthetic construct
  source 1..21: mol_type = other RNA
gccaggggctgacacgggcca

SEQ ID NO: 16880 - RNA, 21 nt, synthetic construct
  source 1..21: mol_type = other RNA
gccaggtccttccaagggtca

SEQ ID NO: 16881 - RNA, 21 nt, synthetic construct
  source 1..21: mol_type = other RNA
gccagtagccagccccgtcct

SEQ ID NO: 16882 - RNA, 21 nt, synthetic construct
  source 1..21: mol_type = other RNA
gccagtggccagaggctgttg

SEQ ID NO: 16883 - RNA, 21 nt, synthetic construct
  source 1..21: mol_type = other RNA
gccagtttctccacctggggc

SEQ ID NO: 16884 - RNA, 21 nt, synthetic construct
  source 1..21: mol_type = other RNA
gccatgacaactgggtggaaa

SEQ ID NO: 16885 - RNA, 21 nt, synthetic construct
  source 1..21: mol_type = other RNA
gcccaacccctccccattcaa

SEQ ID NO: 16886 - RNA, 21 nt, synthetic construct
  source 1..21: mol_type = other RNA
gcccacccagtgtccacaagg

SEQ ID NO: 16887 - RNA, 21 nt, synthetic construct
  source 1..21: mol_type = other RNA
gcccaccccaatgctccaggc

SEQ ID NO: 16888 - RNA, 21 nt, synthetic construct
  source 1..21: mol_type = other RNA
gcccacggcttcgttcctgca

SEQ ID NO: 16889 - RNA, 21 nt, synthetic construct
  source 1..21: mol_type = other RNA
gcccagagcagggccttaggg

SEQ ID NO: 16890 - RNA, 21 nt, synthetic construct
  source 1..21: mol_type = other RNA
gcccagagcagggtcccgctt

SEQ ID NO: 16891 - RNA, 21 nt, synthetic construct
  source 1..21: mol_type = other RNA
gcccagccccgcctccctaag

SEQ ID NO: 16892 - RNA, 21 nt, synthetic construct
  source 1..21: mol_type = other RNA
gcccaggacagcctagtttta

SEQ ID NO: 16893 - RNA, 21 nt, synthetic construct
  source 1..21: mol_type = other RNA
gcccaggagaggcgctcaggc

SEQ ID NO: 16894 - RNA, 21 nt, synthetic construct
  source 1..21: mol_type = other RNA
gcccaggcacacaggtgtgca

SEQ ID NO: 16895 - RNA, 21 nt, synthetic construct
  source 1..21: mol_type = other RNA
gcccaggcccccagctcttct

SEQ ID NO: 16896 - RNA, 21 nt, synthetic construct
  source 1..21: mol_type = other RNA
gcccaggcccctgagtctgtc

SEQ ID NO: 16897 - RNA, 21 nt, synthetic construct
  source 1..21: mol_type = other RNA
gcccaggcctcaggcatcttt

SEQ ID NO: 16898 - RNA, 21 nt, synthetic construct
  source 1..21: mol_type = other RNA
gcccagggctatgcagggtgg

SEQ ID NO: 16899 - RNA, 21 nt, synthetic construct
  source 1..21: mol_type = other RNA
gcccagtacaggcatccctgt

SEQ ID NO: 16900 - RNA, 21 nt, synthetic construct
  source 1..21: mol_type = other RNA
gcccagtggtcaggccggcca

SEQ ID NO: 16901 - RNA, 21 nt, synthetic construct
  source 1..21: mol_type = other RNA
gcccatctggaggaggcggga

SEQ ID NO: 16902 - RNA, 21 nt, synthetic construct
  source 1..21: mol_type = other RNA
gcccattgctctccttgcccc

SEQ ID NO: 16903 - RNA, 21 nt, synthetic construct
  source 1..21: mol_type = other RNA
gccccagcccctcctctctca

SEQ ID NO: 16904 - RNA, 21 nt, synthetic construct
  source 1..21: mol_type = other RNA
gccccagcccttccgccctca

SEQ ID NO: 16905 - RNA, 21 nt, synthetic construct
  source 1..21: mol_type = other RNA
gccccaggccacctacttggc

SEQ ID NO: 16906 - RNA, 21 nt, synthetic construct
  source 1..21: mol_type = other RNA
gccccaggccttgtggacact

SEQ ID NO: 16907 - RNA, 21 nt, synthetic construct
  source 1..21: mol_type = other RNA
gccccaggctgtcacactcca

SEQ ID NO: 16908 - RNA, 21 nt, synthetic construct
  source 1..21: mol_type = other RNA
gccccaggtggagaaactggc

SEQ ID NO: 16909 - RNA, 21 nt, synthetic construct
  source 1..21: mol_type = other RNA
gcccccaaccccctagccact

SEQ ID NO: 16910 - RNA, 21 nt, synthetic construct
  source 1..21: mol_type = other RNA
gcccccagcccctcctgcctt

SEQ ID NO: 16911 - RNA, 21 nt, synthetic construct
  source 1..21: mol_type = other RNA
gcccccagcctctccccattc

SEQ ID NO: 16912 - RNA, 21 nt, synthetic construct
  source 1..21: mol_type = other RNA
gcccccagctcttctctgttc

SEQ ID NO: 16913 - RNA, 21 nt, synthetic construct
  source 1..21: mol_type = other RNA
gcccccagtccctccaccctc

SEQ ID NO: 16914 - RNA, 21 nt, synthetic construct
  source 1..21: mol_type = other RNA
gcccccattcctgcaccccaa

SEQ ID NO: 16915 - RNA, 21 nt, synthetic construct
  source 1..21: mol_type = other RNA
gcccccctcccctatcgccat

SEQ ID NO: 16916 - RNA, 21 nt, synthetic construct
  source 1..21: mol_type = other RNA
gcccccctgctgtggctgttc

SEQ ID NO: 16917 - RNA, 21 nt, synthetic construct
  source 1..21: mol_type = other RNA
gccccctcccttccccgttca

SEQ ID NO: 16918 - RNA, 21 nt, synthetic construct
  source 1..21: mol_type = other RNA
gccccctctgcacggggccct

SEQ ID NO: 16919 - RNA, 21 nt, synthetic construct
  source 1..21: mol_type = other RNA
gccccgcctccctaagaccca

SEQ ID NO: 16920 - RNA, 21 nt, synthetic construct
  source 1..21: mol_type = other RNA
gccccgtcctggcagggctgt

SEQ ID NO: 16921 - RNA, 21 nt, synthetic construct
  source 1..21: mol_type = other RNA
gccccgtgcagagggggcctc

SEQ ID NO: 16922 - RNA, 21 nt, synthetic construct
  source 1..21: mol_type = other RNA
gccccgttcccctgcatcccc

SEQ ID NO: 16923 - RNA, 21 nt, synthetic construct
  source 1..21: mol_type = other RNA
gcccctcctactctagccccc

SEQ ID NO: 16924 - RNA, 21 nt, synthetic construct
  source 1..21: mol_type = other RNA
gcccctcctccttcagagcca

SEQ ID NO: 16925 - RNA, 21 nt, synthetic construct
  source 1..21: mol_type = other RNA
gcccctcctctctcaaaccca

SEQ ID NO: 16926 - RNA, 21 nt, synthetic construct
  source 1..21: mol_type = other RNA
gcccctcctgccttaaaccca

SEQ ID NO: 16927 - RNA, 21 nt, synthetic construct
  source 1..21: mol_type = other RNA
gcccctgagtctgtcccagca

SEQ ID NO: 16928 - RNA, 21 nt, synthetic construct
  source 1..21: mol_type = other RNA
gcccctggctctcctgcccct

SEQ ID NO: 16929 - RNA, 21 nt, synthetic construct
  source 1..21: mol_type = other RNA
gcccctggctgcagggccccg

SEQ ID NO: 16930 - RNA, 21 nt, synthetic construct
  source 1..21: mol_type = other RNA
gccccttcacagcccgagttt

SEQ ID NO: 16931 - RNA, 21 nt, synthetic construct
  source 1..21: mol_type = other RNA
gccccttccctacaggggttc

SEQ ID NO: 16932 - RNA, 21 nt, synthetic construct
  source 1..21: mol_type = other RNA
gcccgagtttccatgacctca

SEQ ID NO: 16933 - RNA, 21 nt, synthetic construct
  source 1..21: mol_type = other RNA
gcccggttctcagtggccacc

SEQ ID NO: 16934 - RNA, 21 nt, synthetic construct
  source 1..21: mol_type = other RNA
gcccgtgtcagcccctggctg

SEQ ID NO: 16935 - RNA, 21 nt, synthetic construct
  source 1..21: mol_type = other RNA
gccctaagaatcctggctcca

SEQ ID NO: 16936 - RNA, 21 nt, synthetic construct
  source 1..21: mol_type = other RNA
gccctcagatgaaggagtcca

SEQ ID NO: 16937 - RNA, 21 nt, synthetic construct
  source 1..21: mol_type = other RNA
gccctcgtagctccctcccgc

SEQ ID NO: 16938 - RNA, 21 nt, synthetic construct
  source 1..21: mol_type = other RNA
gccctgcagccaggggctgac

SEQ ID NO: 16939 - RNA, 21 nt, synthetic construct
  source 1..21: mol_type = other RNA
gccctgccaggacggggctgg

SEQ ID NO: 16940 - RNA, 21 nt, synthetic construct
  source 1..21: mol_type = other RNA
gccctgctctgggcttctggg

SEQ ID NO: 16941 - RNA, 21 nt, synthetic construct
  source 1..21: mol_type = other RNA
gccctgggaacgggatgaact

SEQ ID NO: 16942 - RNA, 21 nt, synthetic construct
  source 1..21: mol_type = other RNA
gccctgggcccacggcttcgt

SEQ ID NO: 16943 - RNA, 21 nt, synthetic construct
  source 1..21: mol_type = other RNA
gccctgtctaccaggctgcct

SEQ ID NO: 16944 - RNA, 21 nt, synthetic construct
  source 1..21: mol_type = other RNA
gcccttccgccctcagatgaa

SEQ ID NO: 16945 - RNA, 21 nt, synthetic construct
  source 1..21: mol_type = other RNA
gccgaagtccagggggtcgga

SEQ ID NO: 16946 - RNA, 21 nt, synthetic construct
  source 1..21: mol_type = other RNA
gccgagttcatcccgttccca

SEQ ID NO: 16947 - RNA, 21 nt, synthetic construct
  source 1..21: mol_type = other RNA
gccgcacgtgccctgggaacg

SEQ ID NO: 16948 - RNA, 21 nt, synthetic construct
  source 1..21: mol_type = other RNA
gccgcctctactccctttctc

SEQ ID NO: 16949 - RNA, 21 nt, synthetic construct
  source 1..21: mol_type = other RNA
gccgcgtcagagcagctcagg

SEQ ID NO: 16950 - RNA, 21 nt, synthetic construct
  source 1..21: mol_type = other RNA
gccggccaggccttcagtgct

SEQ ID NO: 16951 - RNA, 21 nt, synthetic construct
  source 1..21: mol_type = other RNA
gccggcctgaccactgggcaa

SEQ ID NO: 16952 - RNA, 21 nt, synthetic construct
  source 1..21: mol_type = other RNA
gccgggaatcaagagtcaccc

SEQ ID NO: 16953 - RNA, 21 nt, synthetic construct
  source 1..21: mol_type = other RNA
gccgtctggtgcgtttcactg

SEQ ID NO: 16954 - RNA, 21 nt, synthetic construct
  source 1..21: mol_type = other RNA
gccgtgggcccagggctatgc

SEQ ID NO: 16955 - RNA, 21 nt, synthetic construct
  source 1..21: mol_type = other RNA
gccgtgtctaacaggtaccat

SEQ ID NO: 16956 - RNA, 21 nt, synthetic construct
  source 1..21: mol_type = other RNA
gcctagttttagcactgaaac

SEQ ID NO: 16957 - RNA, 21 nt, synthetic construct
  source 1..21: mol_type = other RNA
gcctcaccaagtggttgataa

SEQ ID NO: 16958 - RNA, 21 nt, synthetic construct
  source 1..21: mol_type = other RNA
gcctcaggcatctttcacagg

SEQ ID NO: 16959 - RNA, 21 nt, synthetic construct
  source 1..21: mol_type = other RNA
gcctcagtgaactggagtgtg

SEQ ID NO: 16960 - RNA, 21 nt, synthetic construct
  source 1..21: mol_type = other RNA
gcctccctaagacccagaagt

SEQ ID NO: 16961 - RNA, 21 nt, synthetic construct
  source 1..21: mol_type = other RNA
gcctcctccagatgggcagct

SEQ ID NO: 16962 - RNA, 21 nt, synthetic construct
  source 1..21: mol_type = other RNA
gcctcctgggataccccgaag

SEQ ID NO: 16963 - RNA, 21 nt, synthetic construct
  source 1..21: mol_type = other RNA
gcctcctgggttgaatgggga

SEQ ID NO: 16964 - RNA, 21 nt, synthetic construct
  source 1..21: mol_type = other RNA
gcctctactccctttctcttt

SEQ ID NO: 16965 - RNA, 21 nt, synthetic construct
  source 1..21: mol_type = other RNA
gcctctccccattcagaccca

SEQ ID NO: 16966 - RNA, 21 nt, synthetic construct
  source 1..21: mol_type = other RNA
gcctctcctgggcttgccaag

SEQ ID NO: 16967 - RNA, 21 nt, synthetic construct
  source 1..21: mol_type = other RNA
gcctctcgtggggtccaggcc

SEQ ID NO: 16968 - RNA, 21 nt, synthetic construct
  source 1..21: mol_type = other RNA
gcctctggccactggctgttt

SEQ ID NO: 16969 - RNA, 21 nt, synthetic construct
  source 1..21: mol_type = other RNA
gcctctgggggatgcagggga

SEQ ID NO: 16970 - RNA, 21 nt, synthetic construct
  source 1..21: mol_type = other RNA
gcctgaccactgggcaaccag

SEQ ID NO: 16971 - RNA, 21 nt, synthetic construct
  source 1..21: mol_type = other RNA
gcctgagcgcctctcctgggc

SEQ ID NO: 16972 - RNA, 21 nt, synthetic construct
  source 1..21: mol_type = other RNA
gcctgaggcctgggcaccagg

SEQ ID NO: 16973 - RNA, 21 nt, synthetic construct
  source 1..21: mol_type = other RNA
gcctggaccccacgagaggcc

SEQ ID NO: 16974 - RNA, 21 nt, synthetic construct
  source 1..21: mol_type = other RNA
gcctggacccctgggtctgaa

SEQ ID NO: 16975 - RNA, 21 nt, synthetic construct
  source 1..21: mol_type = other RNA
gcctggactccttcatctgag

SEQ ID NO: 16976 - RNA, 21 nt, synthetic construct
  source 1..21: mol_type = other RNA
gcctggactctggagtccctg

SEQ ID NO: 16977 - RNA, 21 nt, synthetic construct
  source 1..21: mol_type = other RNA
gcctggacttctgggtcttag

SEQ ID NO: 16978 - RNA, 21 nt, synthetic construct
  source 1..21: mol_type = other RNA
gcctggagaaggatgcaggac

SEQ ID NO: 16979 - RNA, 21 nt, synthetic construct
  source 1..21: mol_type = other RNA
gcctggagcattggggtgggc

SEQ ID NO: 16980 - RNA, 21 nt, synthetic construct
  source 1..21: mol_type = other RNA
gcctggccggcctgaccactg

SEQ ID NO: 16981 - RNA, 21 nt, synthetic construct
  source 1..21: mol_type = other RNA
gcctggcctcctgggttgaat

SEQ ID NO: 16982 - RNA, 21 nt, synthetic construct
  source 1..21: mol_type = other RNA
gcctgggcaccagggactcca

SEQ ID NO: 16983 - RNA, 21 nt, synthetic construct
  source 1..21: mol_type = other RNA
gcctgggccccaggctgtcac

SEQ ID NO: 16984 - RNA, 21 nt, synthetic construct
  source 1..21: mol_type = other RNA
gcctgggcgggactcccagag

SEQ ID NO: 16985 - RNA, 21 nt, synthetic construct
  source 1..21: mol_type = other RNA
gcctgggctcctgggtttgag

SEQ ID NO: 16986 - RNA, 21 nt, synthetic construct
  source 1..21: mol_type = other RNA
gcctggggcaagtccctcctc

SEQ ID NO: 16987 - RNA, 21 nt, synthetic construct
  source 1..21: mol_type = other RNA
gcctggggcccaggcacacag

SEQ ID NO: 16988 - RNA, 21 nt, synthetic construct
  source 1..21: mol_type = other RNA
gcctggggcctctgggggatg

SEQ ID NO: 16989 - RNA, 21 nt, synthetic construct
  source 1..21: mol_type = other RNA
gcctggtagacagggctgggg

SEQ ID NO: 16990 - RNA, 21 nt, synthetic construct
  source 1..21: mol_type = other RNA
gcctggttgcccagtggtcag

SEQ ID NO: 16991 - RNA, 21 nt, synthetic construct
  source 1..21: mol_type = other RNA
gcctgtactgggcaggtcctt

SEQ ID NO: 16992 - RNA, 21 nt, synthetic construct
  source 1..21: mol_type = other RNA
gccttaaacccagccaggtcc

SEQ ID NO: 16993 - RNA, 21 nt, synthetic construct
  source 1..21: mol_type = other RNA
gccttagggaagcgggaccct

SEQ ID NO: 16994 - RNA, 21 nt, synthetic construct
  source 1..21: mol_type = other RNA
gccttagtggctagggggttg

SEQ ID NO: 16995 - RNA, 21 nt, synthetic construct
  source 1..21: mol_type = other RNA
gccttatctcacaggtaaaac

SEQ ID NO: 16996 - RNA, 21 nt, synthetic construct
  source 1..21: mol_type = other RNA
gccttcagtgctcagtggaaa

SEQ ID NO: 16997 - RNA, 21 nt, synthetic construct
  source 1..21: mol_type = other RNA
gccttcctccaccctgcatag

SEQ ID NO: 16998 - RNA, 21 nt, synthetic construct
  source 1..21: mol_type = other RNA
gccttgtggacactgggtggg

SEQ ID NO: 16999 - RNA, 21 nt, synthetic construct
  source 1..21: mol_type = other RNA
gcctttccctttcaaggacct

SEQ ID NO: 17000 - RNA, 21 nt, synthetic construct
  source 1..21: mol_type = other RNA
gccttttgggtggattctcct

SEQ ID NO: 17001 - RNA, 21 nt, synthetic construct
  source 1..21: mol_type = other RNA
gcgataggggaggggggcaag

SEQ ID NO: 17002 - RNA, 21 nt, synthetic construct
  source 1..21: mol_type = other RNA
gcgatgcttggggacctgcct

SEQ ID NO: 17003 - RNA, 21 nt, synthetic construct
  source 1..21: mol_type = other RNA
gcgcagggtggccactgagaa

SEQ ID NO: 17004 - RNA, 21 nt, synthetic construct
  source 1..21: mol_type = other RNA
gcgccacctgtgggtggtgac

SEQ ID NO: 17005 - RNA, 21 nt, synthetic construct
  source 1..21: mol_type = other RNA
gcgcctctcctgggcttgcca

SEQ ID NO: 17006 - RNA, 21 nt, synthetic construct
  source 1..21: mol_type = other RNA
gcgctaccctctcccagaacc

SEQ ID NO: 17007 - RNA, 21 nt, synthetic construct
  source 1..21: mol_type = other RNA
gcgctcaggcttccctgtccc

SEQ ID NO: 17008 - RNA, 21 nt, synthetic construct
  source 1..21: mol_type = other RNA
gcgcttccagtgctcagacta

SEQ ID NO: 17009 - RNA, 21 nt, synthetic construct
  source 1..21: mol_type = other RNA
gcggaagggctggggcctggc

SEQ ID NO: 17010 - RNA, 21 nt, synthetic construct
  source 1..21: mol_type = other RNA
gcggaggaatatgtcccagat

SEQ ID NO: 17011 - RNA, 21 nt, synthetic construct
  source 1..21: mol_type = other RNA
gcggccacgacctggtgaaca

SEQ ID NO: 17012 - RNA, 21 nt, synthetic construct
  source 1..21: mol_type = other RNA
gcggccccttcacagcccgag

SEQ ID NO: 17013 - RNA, 21 nt, synthetic construct
  source 1..21: mol_type = other RNA
gcggccgtctggtgcgtttca

SEQ ID NO: 17014 - RNA, 21 nt, synthetic construct
  source 1..21: mol_type = other RNA
gcgggaaccccacatggtacc

SEQ ID NO: 17015 - RNA, 21 nt, synthetic construct
  source 1..21: mol_type = other RNA
gcgggaccctgctctgggcgg

SEQ ID NO: 17016 - RNA, 21 nt, synthetic construct
  source 1..21: mol_type = other RNA
gcgggactcccagaggggtga

SEQ ID NO: 17017 - RNA, 21 nt, synthetic construct
  source 1..21: mol_type = other RNA
gcgggagggagctacgagggc

SEQ ID NO: 17018 - RNA, 21 nt, synthetic construct
  source 1..21: mol_type = other RNA
gcggggctgggcctggacccc

SEQ ID NO: 17019 - RNA, 21 nt, synthetic construct
  source 1..21: mol_type = other RNA
gcgtatcttaaacagccagtg

SEQ ID NO: 17020 - RNA, 21 nt, synthetic construct
  source 1..21: mol_type = other RNA
gcgtcagagcagctcaggttc

SEQ ID NO: 17021 - RNA, 21 nt, synthetic construct
  source 1..21: mol_type = other RNA
gcgtcagttttacctgtgaga

SEQ ID NO: 17022 - RNA, 21 nt, synthetic construct
  source 1..21: mol_type = other RNA
gcgtcctaggtgttcaccagg

SEQ ID NO: 17023 - RNA, 21 nt, synthetic construct
  source 1..21: mol_type = other RNA
gcgtgacctgcccggttctca

SEQ ID NO: 17024 - RNA, 21 nt, synthetic construct
  source 1..21: mol_type = other RNA
gcgtttcactgatcctggtgc

SEQ ID NO: 17025 - RNA, 21 nt, synthetic construct
  source 1..21: mol_type = other RNA
gctaaaactaggctgtcctgg

SEQ ID NO: 17026 - RNA, 21 nt, synthetic construct
  source 1..21: mol_type = other RNA
gctaaactcctagatccacgg

SEQ ID NO: 17027 - RNA, 21 nt, synthetic construct
  source 1..21: mol_type = other RNA
gctaccctctcccagaacctg

SEQ ID NO: 17028 - RNA, 21 nt, synthetic construct
  source 1..21: mol_type = other RNA
gctacgagggccaagagcatg

SEQ ID NO: 17029 - RNA, 21 nt, synthetic construct
  source 1..21: mol_type = other RNA
gctactggccttatctcacag

SEQ ID NO: 17030 - RNA, 21 nt, synthetic construct
  source 1..21: mol_type = other RNA
gctagagtaggaggggctgga

SEQ ID NO: 17031 - RNA, 21 nt, synthetic construct
  source 1..21: mol_type = other RNA
gctaggacagtggggaaaatg

SEQ ID NO: 17032 - RNA, 21 nt, synthetic construct
  source 1..21: mol_type = other RNA
gctagggggttgggggctaga

SEQ ID NO: 17033 - RNA, 21 nt, synthetic construct
  source 1..21: mol_type = other RNA
gctatctgcaaacaggaagtg

SEQ ID NO: 17034 - RNA, 21 nt, synthetic construct
  source 1..21: mol_type = other RNA
gctatctgggacatattcctc

SEQ ID NO: 17035 - RNA, 21 nt, synthetic construct
  source 1..21: mol_type = other RNA
gctatgcagggtggaggaagg

SEQ ID NO: 17036 - RNA, 21 nt, synthetic construct
  source 1..21: mol_type = other RNA
gctcagactagggaagaggtt

SEQ ID NO: 17037 - RNA, 21 nt, synthetic construct
  source 1..21: mol_type = other RNA
gctcaggcttccctgtccccc

SEQ ID NO: 17038 - RNA, 21 nt, synthetic construct
  source 1..21: mol_type = other RNA
gctcaggttctgggagagggt

SEQ ID NO: 17039 - RNA, 21 nt, synthetic construct
  source 1..21: mol_type = other RNA
gctcagtctgaagagcagagc

SEQ ID NO: 17040 - RNA, 21 nt, synthetic construct
  source 1..21: mol_type = other RNA
gctcagtggaaaccacgaaag

SEQ ID NO: 17041 - RNA, 21 nt, synthetic construct
  source 1..21: mol_type = other RNA
gctccagcccctcctactcta

SEQ ID NO: 17042 - RNA, 21 nt, synthetic construct
  source 1..21: mol_type = other RNA
gctccaggcctcctgggatac

SEQ ID NO: 17043 - RNA, 21 nt, synthetic construct
  source 1..21: mol_type = other RNA
gctccagttcaggtcccggag

SEQ ID NO: 17044 - RNA, 21 nt, synthetic construct
  source 1..21: mol_type = other RNA
gctcccctgcttcttggccac

SEQ ID NO: 17045 - RNA, 21 nt, synthetic construct
  source 1..21: mol_type = other RNA
gctccctcccgcctcctccag

SEQ ID NO: 17046 - RNA, 21 nt, synthetic construct
  source 1..21: mol_type = other RNA
gctccctctggagtcccgact

SEQ ID NO: 17047 - RNA, 21 nt, synthetic construct
  source 1..21: mol_type = other RNA
gctccgggacctgaactggag

SEQ ID NO: 17048 - RNA, 21 nt, synthetic construct
  source 1..21: mol_type = other RNA
gctcctgggtttgagagagga

SEQ ID NO: 17049 - RNA, 21 nt, synthetic construct
  source 1..21: mol_type = other RNA
gctcggaaaccaccccagcag

SEQ ID NO: 17050 - RNA, 21 nt, synthetic construct
  source 1..21: mol_type = other RNA
gctcgtttatttccacccagt

SEQ ID NO: 17051 - RNA, 21 nt, synthetic construct
  source 1..21: mol_type = other RNA
gctctcctgccccttccctac

SEQ ID NO: 17052 - RNA, 21 nt, synthetic construct
  source 1..21: mol_type = other RNA
gctctccttgcccccctcccc

SEQ ID NO: 17053 - RNA, 21 nt, synthetic construct
  source 1..21: mol_type = other RNA
gctctgaaggaggaggggctg

SEQ ID NO: 17054 - RNA, 21 nt, synthetic construct
  source 1..21: mol_type = other RNA
gctctgacgcggccgtctggt

SEQ ID NO: 17055 - RNA, 21 nt, synthetic construct
  source 1..21: mol_type = other RNA
gctctgctcttcagactgagc

SEQ ID NO: 17056 - RNA, 21 nt, synthetic construct
  source 1..21: mol_type = other RNA
gctctgggcggaggaatatgt

SEQ ID NO: 17057 - RNA, 21 nt, synthetic construct
  source 1..21: mol_type = other RNA
gctctgggcttctgggtttga

SEQ ID NO: 17058 - RNA, 21 nt, synthetic construct
  source 1..21: mol_type = other RNA
gctcttcacctttctagtccc

SEQ ID NO: 17059 - RNA, 21 nt, synthetic construct
  source 1..21: mol_type = other RNA
gctcttcagactgagccccgt

SEQ ID NO: 17060 - RNA, 21 nt, synthetic construct
  source 1..21: mol_type = other RNA
gctcttctctgttcagcccta

SEQ ID NO: 17061 - RNA, 21 nt, synthetic construct
  source 1..21: mol_type = other RNA
gctcttggccctcgtagctcc

SEQ ID NO: 17062 - RNA, 21 nt, synthetic construct
  source 1..21: mol_type = other RNA
gctgaacagagaagagctggg

SEQ ID NO: 17063 - RNA, 21 nt, synthetic construct
  source 1..21: mol_type = other RNA
gctgacacgggccaccgtttc

SEQ ID NO: 17064 - RNA, 21 nt, synthetic construct
  source 1..21: mol_type = other RNA
gctgaggaaggagtgaagcta

SEQ ID NO: 17065 - RNA, 21 nt, synthetic construct
  source 1..21: mol_type = other RNA
gctgcacacctgtgtgcctgg

SEQ ID NO: 17066 - RNA, 21 nt, synthetic construct
  source 1..21: mol_type = other RNA
gctgcagcaccaggatcagtg

SEQ ID NO: 17067 - RNA, 21 nt, synthetic construct
  source 1..21: mol_type = other RNA
gctgcagcttccttacacttc

SEQ ID NO: 17068 - RNA, 21 nt, synthetic construct
  source 1..21: mol_type = other RNA
gctgcagggccccgtgcagag

SEQ ID NO: 17069 - RNA, 21 nt, synthetic construct
  source 1..21: mol_type = other RNA
gctgcccatctggaggaggcg

SEQ ID NO: 17070 - RNA, 21 nt, synthetic construct
  source 1..21: mol_type = other RNA
gctgccttttgggtggattct

SEQ ID NO: 17071 - RNA, 21 nt, synthetic construct
  source 1..21: mol_type = other RNA
gctgctctgacgcggccgtct

SEQ ID NO: 17072 - RNA, 21 nt, synthetic construct
  source 1..21: mol_type = other RNA
gctggaacctcttccctagtc

SEQ ID NO: 17073 - RNA, 21 nt, synthetic construct
  source 1..21: mol_type = other RNA
gctggagccaggattcttagg

SEQ ID NO: 17074 - RNA, 21 nt, synthetic construct
  source 1..21: mol_type = other RNA
gctggctactggccttatctc

SEQ ID NO: 17075 - RNA, 21 nt, synthetic construct
  source 1..21: mol_type = other RNA
gctgggacagactcaggggcc

SEQ ID NO: 17076 - RNA, 21 nt, synthetic construct
  source 1..21: mol_type = other RNA
gctgggcctggacccctgggt

SEQ ID NO: 17077 - RNA, 21 nt, synthetic construct
  source 1..21: mol_type = other RNA
gctggggcctggactcctggg

SEQ ID NO: 17078 - RNA, 21 nt, synthetic construct
  source 1..21: mol_type = other RNA
gctggggcctggactcgtggg

SEQ ID NO: 17079 - RNA, 21 nt, synthetic construct
  source 1..21: mol_type = other RNA
gctggggcctggcctcctggg

SEQ ID NO: 17080 - RNA, 21 nt, synthetic construct
  source 1..21: mol_type = other RNA
gctgggggccaggactcctgg

SEQ ID NO: 17081 - RNA, 21 nt, synthetic construct
  source 1..21: mol_type = other RNA
gctgggggcctggactccttc

SEQ ID NO: 17082 - RNA, 21 nt, synthetic construct
  source 1..21: mol_type = other RNA
gctgggggcctggacttctgg

SEQ ID NO: 17083 - RNA, 21 nt, synthetic construct
  source 1..21: mol_type = other RNA
gctgggggcctgggctcctgg

SEQ ID NO: 17084 - RNA, 21 nt, synthetic construct
  source 1..21: mol_type = other RNA
gctggggtggcctctcgtggg

SEQ ID NO: 17085 - RNA, 21 nt, synthetic construct
  source 1..21: mol_type = other RNA
gctggggtggtttccgagctt

SEQ ID NO: 17086 - RNA, 21 nt, synthetic construct
  source 1..21: mol_type = other RNA
gctggggttcagagaggaggg

SEQ ID NO: 17087 - RNA, 21 nt, synthetic construct
  source 1..21: mol_type = other RNA
gctgggtttaaggcaggaggg

SEQ ID NO: 17088 - RNA, 21 nt, synthetic construct
  source 1..21: mol_type = other RNA
gctgggtttgggtcaggtctg

SEQ ID NO: 17089 - RNA, 21 nt, synthetic construct
  source 1..21: mol_type = other RNA
gctggtaccctgcccccattc

SEQ ID NO: 17090 - RNA, 21 nt, synthetic construct
  source 1..21: mol_type = other RNA
gctggtcaccccacacccaga

SEQ ID NO: 17091 - RNA, 21 nt, synthetic construct
  source 1..21: mol_type = other RNA
gctgtcacactccagttcact

SEQ ID NO: 17092 - RNA, 21 nt, synthetic construct
  source 1..21: mol_type = other RNA
gctgtcctgggcaaacagcat

SEQ ID NO: 17093 - RNA, 21 nt, synthetic construct
  source 1..21: mol_type = other RNA
gctgtctcacccctctgggag

SEQ ID NO: 17094 - RNA, 21 nt, synthetic construct
  source 1..21: mol_type = other RNA
gctgtgaaggggccgcacgtg

SEQ ID NO: 17095 - RNA, 21 nt, synthetic construct
  source 1..21: mol_type = other RNA
gctgtggctgttcccaagttc

SEQ ID NO: 17096 - RNA, 21 nt, synthetic construct
  source 1..21: mol_type = other RNA
gctgtggtgaggaggggggtg

SEQ ID NO: 17097 - RNA, 21 nt, synthetic construct
  source 1..21: mol_type = other RNA
gctgtgtttctcgtcctgcat

SEQ ID NO: 17098 - RNA, 21 nt, synthetic construct
  source 1..21: mol_type = other RNA
gctgttcccaagttcttaggg

SEQ ID NO: 17099 - RNA, 21 nt, synthetic construct
  source 1..21: mol_type = other RNA
gctgttgggtcattttcccca

SEQ ID NO: 17100 - RNA, 21 nt, synthetic construct
  source 1..21: mol_type = other RNA
gctgtttaagatacgcctggt

SEQ ID NO: 17101 - RNA, 21 nt, synthetic construct
  source 1..21: mol_type = other RNA
gctgtttgcccaggacagcct

SEQ ID NO: 17102 - RNA, 21 nt, synthetic construct
  source 1..21: mol_type = other RNA
gcttatgctgtttgcccagga

SEQ ID NO: 17103 - RNA, 21 nt, synthetic construct
  source 1..21: mol_type = other RNA
gcttcactccttcctcagctc

SEQ ID NO: 17104 - RNA, 21 nt, synthetic construct
  source 1..21: mol_type = other RNA
gcttccagtgctcagactagg

SEQ ID NO: 17105 - RNA, 21 nt, synthetic construct
  source 1..21: mol_type = other RNA
gcttccctaaggccctgctct

SEQ ID NO: 17106 - RNA, 21 nt, synthetic construct
  source 1..21: mol_type = other RNA
gcttccctgtcccccttcctc

SEQ ID NO: 17107 - RNA, 21 nt, synthetic construct
  source 1..21: mol_type = other RNA
gcttccttacacttcccaaga

SEQ ID NO: 17108 - RNA, 21 nt, synthetic construct
  source 1..21: mol_type = other RNA
gcttcgttcctgcagagtatc

SEQ ID NO: 17109 - RNA, 21 nt, synthetic construct
  source 1..21: mol_type = other RNA
gcttctcatctgggtgcggga

SEQ ID NO: 17110 - RNA, 21 nt, synthetic construct
  source 1..21: mol_type = other RNA
gcttctcctcttgggaagtgt

SEQ ID NO: 17111 - RNA, 21 nt, synthetic construct
  source 1..21: mol_type = other RNA
gcttctgggtttgagtccttg

SEQ ID NO: 17112 - RNA, 21 nt, synthetic construct
  source 1..21: mol_type = other RNA
gcttcttggccacgtaacctg

SEQ ID NO: 17113 - RNA, 21 nt, synthetic construct
  source 1..21: mol_type = other RNA
gcttgacccttggaaggacct

SEQ ID NO: 17114 - RNA, 21 nt, synthetic construct
  source 1..21: mol_type = other RNA
gcttgccaaggactcaaaccc

SEQ ID NO: 17115 - RNA, 21 nt, synthetic construct
  source 1..21: mol_type = other RNA
gcttggcaaactcactcttcg

SEQ ID NO: 17116 - RNA, 21 nt, synthetic construct
  source 1..21: mol_type = other RNA
gcttggggacctgcctggaga

SEQ ID NO: 17117 - RNA, 21 nt, synthetic construct
  source 1..21: mol_type = other RNA
gctttggagaggtgagggact

SEQ ID NO: 17118 - RNA, 21 nt, synthetic construct
  source 1..21: mol_type = other RNA
gcttttgtccccccaagtttt

SEQ ID NO: 17119 - RNA, 21 nt, synthetic construct
  source 1..21: mol_type = other RNA
ggaaaaacaaaatcagaataa

SEQ ID NO: 17120 - RNA, 21 nt, synthetic construct
  source 1..21: mol_type = other RNA
ggaaaacagggatggttggtc

SEQ ID NO: 17121 - RNA, 21 nt, synthetic construct
  source 1..21: mol_type = other RNA
ggaaaactccctttgtgagaa

SEQ ID NO: 17122 - RNA, 21 nt, synthetic construct
  source 1..21: mol_type = other RNA
ggaaaatgacccaacagcctc

SEQ ID NO: 17123 - RNA, 21 nt, synthetic construct
  source 1..21: mol_type = other RNA
ggaaaccaccccagcagatac

SEQ ID NO: 17124 - RNA, 21 nt, synthetic construct
  source 1..21: mol_type = other RNA
ggaaaccacgaaaggactcct

SEQ ID NO: 17125 - RNA, 21 nt, synthetic construct
  source 1..21: mol_type = other RNA
ggaaactcgggctgtgaaggg

SEQ ID NO: 17126 - RNA, 21 nt, synthetic construct
  source 1..21: mol_type = other RNA
ggaaagaaggatggagaaaga

SEQ ID NO: 17127 - RNA, 21 nt, synthetic construct
  source 1..21: mol_type = other RNA
ggaaaggcccattgctctcct

SEQ ID NO: 17128 - RNA, 21 nt, synthetic construct
  source 1..21: mol_type = other RNA
ggaaataaacgagccgagttc

SEQ ID NO: 17129 - RNA, 21 nt, synthetic construct
  source 1..21: mol_type = other RNA
ggaacaatataaattggggac

SEQ ID NO: 17130 - RNA, 21 nt, synthetic construct
  source 1..21: mol_type = other RNA
ggaacagccacagcagggggg

SEQ ID NO: 17131 - RNA, 21 nt, synthetic construct
  source 1..21: mol_type = other RNA
ggaaccccacatggtacctgt

SEQ ID NO: 17132 - RNA, 21 nt, synthetic construct
  source 1..21: mol_type = other RNA
ggaacccctgtagggaagggg

SEQ ID NO: 17133 - RNA, 21 nt, synthetic construct
  source 1..21: mol_type = other RNA
ggaacctcttccctagtctga

SEQ ID NO: 17134 - RNA, 21 nt, synthetic construct
  source 1..21: mol_type = other RNA
ggaacgaagccgtgggcccag

SEQ ID NO: 17135 - RNA, 21 nt, synthetic construct
  source 1..21: mol_type = other RNA
ggaacgggatgaactcggctc

SEQ ID NO: 17136 - RNA, 21 nt, synthetic construct
  source 1..21: mol_type = other RNA
ggaacggggatgcaggggaac

SEQ ID NO: 17137 - RNA, 21 nt, synthetic construct
  source 1..21: mol_type = other RNA
ggaacggggctcagtctgaag

SEQ ID NO: 17138 - RNA, 21 nt, synthetic construct
  source 1..21: mol_type = other RNA
ggaagaatgagaaacggtggc

SEQ ID NO: 17139 - RNA, 21 nt, synthetic construct
  source 1..21: mol_type = other RNA
ggaagaggttccagcccctcc

SEQ ID NO: 17140 - RNA, 21 nt, synthetic construct
  source 1..21: mol_type = other RNA
ggaagcctgagcgcctctcct

SEQ ID NO: 17141 - RNA, 21 nt, synthetic construct
  source 1..21: mol_type = other RNA
ggaagcgccacctgtgggtgg

SEQ ID NO: 17142 - RNA, 21 nt, synthetic construct
  source 1..21: mol_type = other RNA
ggaagcgggaccctgctctgg

SEQ ID NO: 17143 - RNA, 21 nt, synthetic construct
  source 1..21: mol_type = other RNA
ggaagctgcagcaccaggatc

SEQ ID NO: 17144 - RNA, 21 nt, synthetic construct
  source 1..21: mol_type = other RNA
ggaaggacctggctgggttta

SEQ ID NO: 17145 - RNA, 21 nt, synthetic construct
  source 1..21: mol_type = other RNA
ggaaggagtgaagctaaactc

SEQ ID NO: 17146 - RNA, 21 nt, synthetic construct
  source 1..21: mol_type = other RNA
ggaaggccaccctgtgctggg

SEQ ID NO: 17147 - RNA, 21 nt, synthetic construct
  source 1..21: mol_type = other RNA
ggaagggagggggcttctcat

SEQ ID NO: 17148 - RNA, 21 nt, synthetic construct
  source 1..21: mol_type = other RNA
ggaagggctggggcctggcct

SEQ ID NO: 17149 - RNA, 21 nt, synthetic construct
  source 1..21: mol_type = other RNA
ggaaggggcaggagagccagg

SEQ ID NO: 17150 - RNA, 21 nt, synthetic construct
  source 1..21: mol_type = other RNA
ggaagggggacagggaagcct

SEQ ID NO: 17151 - RNA, 21 nt, synthetic construct
  source 1..21: mol_type = other RNA
ggaagggggatgcaggggaac

SEQ ID NO: 17152 - RNA, 21 nt, synthetic construct
  source 1..21: mol_type = other RNA
ggaagtgaacggggaagggag

SEQ ID NO: 17153 - RNA, 21 nt, synthetic construct
  source 1..21: mol_type = other RNA
ggaagtgtaaggaagctgcag

SEQ ID NO: 17154 - RNA, 21 nt, synthetic construct
  source 1..21: mol_type = other RNA
ggaatatgtcccagatagcac

SEQ ID NO: 17155 - RNA, 21 nt, synthetic construct
  source 1..21: mol_type = other RNA
ggaatcaagagtcacccagag

SEQ ID NO: 17156 - RNA, 21 nt, synthetic construct
  source 1..21: mol_type = other RNA
ggaatccctcctctctgaacc

SEQ ID NO: 17157 - RNA, 21 nt, synthetic construct
  source 1..21: mol_type = other RNA
ggaatgggggcagggtaccag

SEQ ID NO: 17158 - RNA, 21 nt, synthetic construct
  source 1..21: mol_type = other RNA
ggacaaaagccgaagtccagg

SEQ ID NO: 17159 - RNA, 21 nt, synthetic construct
  source 1..21: mol_type = other RNA
ggacacccccctcctcaccac

SEQ ID NO: 17160 - RNA, 21 nt, synthetic construct
  source 1..21: mol_type = other RNA
ggacacggtgctaggacagtg

SEQ ID NO: 17161 - RNA, 21 nt, synthetic construct
  source 1..21: mol_type = other RNA
ggacactgggtgggctccggg

SEQ ID NO: 17162 - RNA, 21 nt, synthetic construct
  source 1..21: mol_type = other RNA
ggacagactcaggggcctggg

SEQ ID NO: 17163 - RNA, 21 nt, synthetic construct
  source 1..21: mol_type = other RNA
ggacagcctagttttagcact

SEQ ID NO: 17164 - RNA, 21 nt, synthetic construct
  source 1..21: mol_type = other RNA
ggacagggaagcctgagcgcc

SEQ ID NO: 17165 - RNA, 21 nt, synthetic construct
  source 1..21: mol_type = other RNA
ggacagtggggaaaatgaccc

SEQ ID NO: 17166 - RNA, 21 nt, synthetic construct
  source 1..21: mol_type = other RNA
ggacatattcctccgcccaga

SEQ ID NO: 17167 - RNA, 21 nt, synthetic construct
  source 1..21: mol_type = other RNA
ggaccaacttattctgatttt

SEQ ID NO: 17168 - RNA, 21 nt, synthetic construct
  source 1..21: mol_type = other RNA
ggacccaggagtccaggcccc

SEQ ID NO: 17169 - RNA, 21 nt, synthetic construct
  source 1..21: mol_type = other RNA
ggaccccacgagaggccaccc

SEQ ID NO: 17170 - RNA, 21 nt, synthetic construct
  source 1..21: mol_type = other RNA
ggacccctaagggaagaatga

SEQ ID NO: 17171 - RNA, 21 nt, synthetic construct
  source 1..21: mol_type = other RNA
ggacccctgggtctgaatggg

SEQ ID NO: 17172 - RNA, 21 nt, synthetic construct
  source 1..21: mol_type = other RNA
ggaccctgctctgggcggagg

SEQ ID NO: 17173 - RNA, 21 nt, synthetic construct
  source 1..21: mol_type = other RNA
ggacctgaactggagctgagg

SEQ ID NO: 17174 - RNA, 21 nt, synthetic construct
  source 1..21: mol_type = other RNA
ggacctgcccagtacaggcat

SEQ ID NO: 17175 - RNA, 21 nt, synthetic construct
  source 1..21: mol_type = other RNA
ggacctgcctggagaaggatg

SEQ ID NO: 17176 - RNA, 21 nt, synthetic construct
  source 1..21: mol_type = other RNA
ggacctggctgggtttaaggc

SEQ ID NO: 17177 - RNA, 21 nt, synthetic construct
  source 1..21: mol_type = other RNA
ggacgagaaacacagccccag

SEQ ID NO: 17178 - RNA, 21 nt, synthetic construct
  source 1..21: mol_type = other RNA
ggacgaggaagggggacaggg

SEQ ID NO: 17179 - RNA, 21 nt, synthetic construct
  source 1..21: mol_type = other RNA
ggacgcaccattctcacaaag

SEQ ID NO: 17180 - RNA, 21 nt, synthetic construct
  source 1..21: mol_type = other RNA
ggacggggctggctactggcc

SEQ ID NO: 17181 - RNA, 21 nt, synthetic construct
  source 1..21: mol_type = other RNA
ggactagaaaggtgaagagcc

SEQ ID NO: 17182 - RNA, 21 nt, synthetic construct
  source 1..21: mol_type = other RNA
ggactcaaacccagaagccca

SEQ ID NO: 17183 - RNA, 21 nt, synthetic construct
  source 1..21: mol_type = other RNA
ggactccagagggagccacga

SEQ ID NO: 17184 - RNA, 21 nt, synthetic construct
  source 1..21: mol_type = other RNA
ggactccagagtccaggccca

SEQ ID NO: 17185 - RNA, 21 nt, synthetic construct
  source 1..21: mol_type = other RNA
ggactcccagaggggtgagac

SEQ ID NO: 17186 - RNA, 21 nt, synthetic construct
  source 1..21: mol_type = other RNA
ggactcctggctatctgcaaa

SEQ ID NO: 17187 - RNA, 21 nt, synthetic construct
  source 1..21: mol_type = other RNA
ggactcctggctctgaaggag

SEQ ID NO: 17188 - RNA, 21 nt, synthetic construct
  source 1..21: mol_type = other RNA
ggactcctgggtctgagggtg

SEQ ID NO: 17189 - RNA, 21 nt, synthetic construct
  source 1..21: mol_type = other RNA
ggactccttcatctgagggcg

SEQ ID NO: 17190 - RNA, 21 nt, synthetic construct
  source 1..21: mol_type = other RNA
ggactcgtgggtctgagggag

SEQ ID NO: 17191 - RNA, 21 nt, synthetic construct
  source 1..21: mol_type = other RNA
ggactctggagtccctggtgc

SEQ ID NO: 17192 - RNA, 21 nt, synthetic construct
  source 1..21: mol_type = other RNA
ggactctttaaggaaagaagg

SEQ ID NO: 17193 - RNA, 21 nt, synthetic construct
  source 1..21: mol_type = other RNA
ggactgagggtttcagtgcta

SEQ ID NO: 17194 - RNA, 21 nt, synthetic construct
  source 1..21: mol_type = other RNA
ggactgggggcctggactcct

SEQ ID NO: 17195 - RNA, 21 nt, synthetic construct
  source 1..21: mol_type = other RNA
ggacttcggcttttgtccccc

SEQ ID NO: 17196 - RNA, 21 nt, synthetic construct
  source 1..21: mol_type = other RNA
ggacttctgggtcttagggag

SEQ ID NO: 17197 - RNA, 21 nt, synthetic construct
  source 1..21: mol_type = other RNA
ggacttgccccaggccttgtg

SEQ ID NO: 17198 - RNA, 21 nt, synthetic construct
  source 1..21: mol_type = other RNA
ggacttggggggtaatttatc

SEQ ID NO: 17199 - RNA, 21 nt, synthetic construct
  source 1..21: mol_type = other RNA
ggagaaactggccgggaatca

SEQ ID NO: 17200 - RNA, 21 nt, synthetic construct
  source 1..21: mol_type = other RNA
ggagaaagagaaagggagtag

SEQ ID NO: 17201 - RNA, 21 nt, synthetic construct
  source 1..21: mol_type = other RNA
ggagaagcagtttggaaaaac

SEQ ID NO: 17202 - RNA, 21 nt, synthetic construct
  source 1..21: mol_type = other RNA
ggagaaggatgcaggacgaga

SEQ ID NO: 17203 - RNA, 21 nt, synthetic construct
  source 1..21: mol_type = other RNA
ggagaatccacccaaaaggca

SEQ ID NO: 17204 - RNA, 21 nt, synthetic construct
  source 1..21: mol_type = other RNA
ggagagcaatgggcctttccc

SEQ ID NO: 17205 - RNA, 21 nt, synthetic construct
  source 1..21: mol_type = other RNA
ggagagccaggggcatgagat

SEQ ID NO: 17206 - RNA, 21 nt, synthetic construct
  source 1..21: mol_type = other RNA
ggagaggcgctcaggcttccc

SEQ ID NO: 17207 - RNA, 21 nt, synthetic construct
  source 1..21: mol_type = other RNA
ggagaggctgggggcctggac

SEQ ID NO: 17208 - RNA, 21 nt, synthetic construct
  source 1..21: mol_type = other RNA
ggagagggtagcgcagggtgg

SEQ ID NO: 17209 - RNA, 21 nt, synthetic construct
  source 1..21: mol_type = other RNA
ggagaggtgagggacttgggg

SEQ ID NO: 17210 - RNA, 21 nt, synthetic construct
  source 1..21: mol_type = other RNA
ggagcattggggtgggctggg

SEQ ID NO: 17211 - RNA, 21 nt, synthetic construct
  source 1..21: mol_type = other RNA
ggagccacgaaaacagatcca

SEQ ID NO: 17212 - RNA, 21 nt, synthetic construct
  source 1..21: mol_type = other RNA
ggagccaggattcttagggct

SEQ ID NO: 17213 - RNA, 21 nt, synthetic construct
  source 1..21: mol_type = other RNA
ggagcccacccagtgtccaca

SEQ ID NO: 17214 - RNA, 21 nt, synthetic construct
  source 1..21: mol_type = other RNA
ggagcccaggcccccagctct

SEQ ID NO: 17215 - RNA, 21 nt, synthetic construct
  source 1..21: mol_type = other RNA
ggagctacgagggccaagagc

SEQ ID NO: 17216 - RNA, 21 nt, synthetic construct
  source 1..21: mol_type = other RNA
ggagctgaggaaggagtgaag

SEQ ID NO: 17217 - RNA, 21 nt, synthetic construct
  source 1..21: mol_type = other RNA
ggagctgggtttgggtcaggt

SEQ ID NO: 17218 - RNA, 21 nt, synthetic construct
  source 1..21: mol_type = other RNA
ggaggaacaatataaattggg

SEQ ID NO: 17219 - RNA, 21 nt, synthetic construct
  source 1..21: mol_type = other RNA
ggaggaaggccaccctgtgct

SEQ ID NO: 17220 - RNA, 21 nt, synthetic construct
  source 1..21: mol_type = other RNA
ggaggaatatgtcccagatag

SEQ ID NO: 17221 - RNA, 21 nt, synthetic construct
  source 1..21: mol_type = other RNA
ggaggagaatccacccaaaag

SEQ ID NO: 17222 - RNA, 21 nt, synthetic construct
  source 1..21: mol_type = other RNA
ggaggaggcgggagggagcta

SEQ ID NO: 17223 - RNA, 21 nt, synthetic construct
  source 1..21: mol_type = other RNA
ggaggagggacttgccccagg

SEQ ID NO: 17224 - RNA, 21 nt, synthetic construct
  source 1..21: mol_type = other RNA
ggaggaggggctggaacctct

SEQ ID NO: 17225 - RNA, 21 nt, synthetic construct
  source 1..21: mol_type = other RNA
ggaggaggggctggggcctgg

SEQ ID NO: 17226 - RNA, 21 nt, synthetic construct
  source 1..21: mol_type = other RNA
ggaggccaggccccagccctt

SEQ ID NO: 17227 - RNA, 21 nt, synthetic construct
  source 1..21: mol_type = other RNA
ggaggcctggagcattggggt

SEQ ID NO: 17228 - RNA, 21 nt, synthetic construct
  source 1..21: mol_type = other RNA
ggaggcgggagggagctacga

SEQ ID NO: 17229 - RNA, 21 nt, synthetic construct
  source 1..21: mol_type = other RNA
ggagggacttgccccaggcct

SEQ ID NO: 17230 - RNA, 21 nt, synthetic construct
  source 1..21: mol_type = other RNA
ggagggagctacgagggccaa

SEQ ID NO: 17231 - RNA, 21 nt, synthetic construct
  source 1..21: mol_type = other RNA
ggagggattcccttctcaggt

SEQ ID NO: 17232 - RNA, 21 nt, synthetic construct
  source 1..21: mol_type = other RNA
ggaggggctggaacctcttcc

SEQ ID NO: 17233 - RNA, 21 nt, synthetic construct
  source 1..21: mol_type = other RNA
ggaggggctggagccaggatt

SEQ ID NO: 17234 - RNA, 21 nt, synthetic construct
  source 1..21: mol_type = other RNA
ggaggggctggggcctggact

SEQ ID NO: 17235 - RNA, 21 nt, synthetic construct
  source 1..21: mol_type = other RNA
ggaggggctgggggccaggac

SEQ ID NO: 17236 - RNA, 21 nt, synthetic construct
  source 1..21: mol_type = other RNA
ggagggggcttctcatctggg

SEQ ID NO: 17237 - RNA, 21 nt, synthetic construct
  source 1..21: mol_type = other RNA
ggaggggggcaaggagagcaa

SEQ ID NO: 17238 - RNA, 21 nt, synthetic construct
  source 1..21: mol_type = other RNA
ggaggggggtgtccgtgtgga

SEQ ID NO: 17239 - RNA, 21 nt, synthetic construct
  source 1..21: mol_type = other RNA
ggaggggttgggcctggactc

SEQ ID NO: 17240 - RNA, 21 nt, synthetic construct
  source 1..21: mol_type = other RNA
ggagtagaggcggccacgacc

SEQ ID NO: 17241 - RNA, 21 nt, synthetic construct
  source 1..21: mol_type = other RNA
ggagtccaggcccccagcctc

SEQ ID NO: 17242 - RNA, 21 nt, synthetic construct
  source 1..21: mol_type = other RNA
ggagtccaggcccccagtccc

SEQ ID NO: 17243 - RNA, 21 nt, synthetic construct
  source 1..21: mol_type = other RNA
ggagtcccgacttgctgggac

SEQ ID NO: 17244 - RNA, 21 nt, synthetic construct
  source 1..21: mol_type = other RNA
ggagtcccgcccaggcccctg

SEQ ID NO: 17245 - RNA, 21 nt, synthetic construct
  source 1..21: mol_type = other RNA
ggagtccctggtgcccaggcc

SEQ ID NO: 17246 - RNA, 21 nt, synthetic construct
  source 1..21: mol_type = other RNA
ggagtcctggcccccagcccc

SEQ ID NO: 17247 - RNA, 21 nt, synthetic construct
  source 1..21: mol_type = other RNA
ggagtcctttcgtggtttcca

SEQ ID NO: 17248 - RNA, 21 nt, synthetic construct
  source 1..21: mol_type = other RNA
ggagtgaagctaaactcctag

SEQ ID NO: 17249 - RNA, 21 nt, synthetic construct
  source 1..21: mol_type = other RNA
ggagtgtgacagcctggggcc

SEQ ID NO: 17250 - RNA, 21 nt, synthetic construct
  source 1..21: mol_type = other RNA
ggagtttagcttcactccttc

SEQ ID NO: 17251 - RNA, 21 nt, synthetic construct
  source 1..21: mol_type = other RNA
ggagttttccacacggacacc

SEQ ID NO: 17252 - RNA, 21 nt, synthetic construct
  source 1..21: mol_type = other RNA
ggataaattaccccccaagtc

SEQ ID NO: 17253 - RNA, 21 nt, synthetic construct
  source 1..21: mol_type = other RNA
ggataccccgaagagtgagtt

SEQ ID NO: 17254 - RNA, 21 nt, synthetic construct
  source 1..21: mol_type = other RNA
ggatcagtgaaacgcaccaga

SEQ ID NO: 17255 - RNA, 21 nt, synthetic construct
  source 1..21: mol_type = other RNA
ggatctaggagtttagcttca

SEQ ID NO: 17256 - RNA, 21 nt, synthetic construct
  source 1..21: mol_type = other RNA
ggatctgttttcgtggctccc

SEQ ID NO: 17257 - RNA, 21 nt, synthetic construct
  source 1..21: mol_type = other RNA
ggatgaactcggctcgtttat

SEQ ID NO: 17258 - RNA, 21 nt, synthetic construct
  source 1..21: mol_type = other RNA
ggatgcaggacgagaaacaca

SEQ ID NO: 17259 - RNA, 21 nt, synthetic construct
  source 1..21: mol_type = other RNA
ggatgcaggggaacggggatg

SEQ ID NO: 17260 - RNA, 21 nt, synthetic construct
  source 1..21: mol_type = other RNA
ggatgcaggggaacggggctc

SEQ ID NO: 17261 - RNA, 21 nt, synthetic construct
  source 1..21: mol_type = other RNA
ggatgcaggggaagggggatg

SEQ ID NO: 17262 - RNA, 21 nt, synthetic construct
  source 1..21: mol_type = other RNA
ggatgcctgtactgggcaggt

SEQ ID NO: 17263 - RNA, 21 nt, synthetic construct
  source 1..21: mol_type = other RNA
ggatgcgtgacctgcccggtt

SEQ ID NO: 17264 - RNA, 21 nt, synthetic construct
  source 1..21: mol_type = other RNA
ggatggagaaagagaaaggga

SEQ ID NO: 17265 - RNA, 21 nt, synthetic construct
  source 1..21: mol_type = other RNA
ggatggttggtcactgtctct

SEQ ID NO: 17266 - RNA, 21 nt, synthetic construct
  source 1..21: mol_type = other RNA
ggattcccttctcaggttacg

SEQ ID NO: 17267 - RNA, 21 nt, synthetic construct
  source 1..21: mol_type = other RNA
ggattctcctccaactgtggg

SEQ ID NO: 17268 - RNA, 21 nt, synthetic construct
  source 1..21: mol_type = other RNA
ggattcttagggctgaacaga

SEQ ID NO: 17269 - RNA, 21 nt, synthetic construct
  source 1..21: mol_type = other RNA
ggcaaaacccccgtcaccacc

SEQ ID NO: 17270 - RNA, 21 nt, synthetic construct
  source 1..21: mol_type = other RNA
ggcaaacagcataagctggtc

SEQ ID NO: 17271 - RNA, 21 nt, synthetic construct
  source 1..21: mol_type = other RNA
ggcaaactcactcttcggggt

SEQ ID NO: 17272 - RNA, 21 nt, synthetic construct
  source 1..21: mol_type = other RNA
ggcaaccaggcgtatcttaaa

SEQ ID NO: 17273 - RNA, 21 nt, synthetic construct
  source 1..21: mol_type = other RNA
ggcaagcccaggagaggcgct

SEQ ID NO: 17274 - RNA, 21 nt, synthetic construct
  source 1..21: mol_type = other RNA
ggcaaggagagcaatgggcct

SEQ ID NO: 17275 - RNA, 21 nt, synthetic construct
  source 1..21: mol_type = other RNA
ggcaagtccctcctccgaccc

SEQ ID NO: 17276 - RNA, 21 nt, synthetic construct
  source 1..21: mol_type = other RNA
ggcaattggggtgcaggaatg

SEQ ID NO: 17277 - RNA, 21 nt, synthetic construct
  source 1..21: mol_type = other RNA
ggcacacaggtgtgcagctgt

SEQ ID NO: 17278 - RNA, 21 nt, synthetic construct
  source 1..21: mol_type = other RNA
ggcaccagggactccagagtc

SEQ ID NO: 17279 - RNA, 21 nt, synthetic construct
  source 1..21: mol_type = other RNA
ggcacgtgcggccccttcaca

SEQ ID NO: 17280 - RNA, 21 nt, synthetic construct
  source 1..21: mol_type = other RNA
ggcagcctggtagacagggct

SEQ ID NO: 17281 - RNA, 21 nt, synthetic construct
  source 1..21: mol_type = other RNA
ggcagctttggagaggtgagg

SEQ ID NO: 17282 - RNA, 21 nt, synthetic construct
  source 1..21: mol_type = other RNA
ggcaggagagccaggggcatg

SEQ ID NO: 17283 - RNA, 21 nt, synthetic construct
  source 1..21: mol_type = other RNA
ggcaggaggggctgggggcca

SEQ ID NO: 17284 - RNA, 21 nt, synthetic construct
  source 1..21: mol_type = other RNA
ggcagggctgtggtgaggagg

SEQ ID NO: 17285 - RNA, 21 nt, synthetic construct
  source 1..21: mol_type = other RNA
ggcagggtaccagcctcacca

SEQ ID NO: 17286 - RNA, 21 nt, synthetic construct
  source 1..21: mol_type = other RNA
ggcaggtccccaagcatcgcc

SEQ ID NO: 17287 - RNA, 21 nt, synthetic construct
  source 1..21: mol_type = other RNA
ggcaggtccttgaaagggaaa

SEQ ID NO: 17288 - RNA, 21 nt, synthetic construct
  source 1..21: mol_type = other RNA
ggcatccctgtgaaagatgcc

SEQ ID NO: 17289 - RNA, 21 nt, synthetic construct
  source 1..21: mol_type = other RNA
ggcatctttcacagggatgcc

SEQ ID NO: 17290 - RNA, 21 nt, synthetic construct
  source 1..21: mol_type = other RNA
ggcatgagatggtggacgagg

SEQ ID NO: 17291 - RNA, 21 nt, synthetic construct
  source 1..21: mol_type = other RNA
ggccaagaagcaggggagctg

SEQ ID NO: 17292 - RNA, 21 nt, synthetic construct
  source 1..21: mol_type = other RNA
ggccaagagcatgaggtcatg

SEQ ID NO: 17293 - RNA, 21 nt, synthetic construct
  source 1..21: mol_type = other RNA
ggccaagtaggtggcctgggg

SEQ ID NO: 17294 - RNA, 21 nt, synthetic construct
  source 1..21: mol_type = other RNA
ggccaccccagccctgtctac

SEQ ID NO: 17295 - RNA, 21 nt, synthetic construct
  source 1..21: mol_type = other RNA
ggccaccctgcgctaccctct

SEQ ID NO: 17296 - RNA, 21 nt, synthetic construct
  source 1..21: mol_type = other RNA
ggccaccctgtgctgggacag

SEQ ID NO: 17297 - RNA, 21 nt, synthetic construct
  source 1..21: mol_type = other RNA
ggccaccgtttctcattcttc

SEQ ID NO: 17298 - RNA, 21 nt, synthetic construct
  source 1..21: mol_type = other RNA
ggccacctacttggcctggac

SEQ ID NO: 17299 - RNA, 21 nt, synthetic construct
  source 1..21: mol_type = other RNA
ggccacgacctggtgaacacc

SEQ ID NO: 17300 - RNA, 21 nt, synthetic construct
  source 1..21: mol_type = other RNA
ggccacgtaacctgagaaggg

SEQ ID NO: 17301 - RNA, 21 nt, synthetic construct
  source 1..21: mol_type = other RNA
ggccactgagaaccgggcagg

SEQ ID NO: 17302 - RNA, 21 nt, synthetic construct
  source 1..21: mol_type = other RNA
ggccactggctgtttaagata

SEQ ID NO: 17303 - RNA, 21 nt, synthetic construct
  source 1..21: mol_type = other RNA
ggccagaggctgttgggtcat

SEQ ID NO: 17304 - RNA, 21 nt, synthetic construct
  source 1..21: mol_type = other RNA
ggccaggactcctggctctga

SEQ ID NO: 17305 - RNA, 21 nt, synthetic construct
  source 1..21: mol_type = other RNA
ggccaggccccagcccttccg

SEQ ID NO: 17306 - RNA, 21 nt, synthetic construct
  source 1..21: mol_type = other RNA
ggccaggccttcagtgctcag

SEQ ID NO: 17307 - RNA, 21 nt, synthetic construct
  source 1..21: mol_type = other RNA
ggccagtagccagccccgtcc

SEQ ID NO: 17308 - RNA, 21 nt, synthetic construct
  source 1..21: mol_type = other RNA
ggccagtttctccacctgggg

SEQ ID NO: 17309 - RNA, 21 nt, synthetic construct
  source 1..21: mol_type = other RNA
ggcccaacccctccccattca

SEQ ID NO: 17310 - RNA, 21 nt, synthetic construct
  source 1..21: mol_type = other RNA
ggcccacggcttcgttcctgc

SEQ ID NO: 17311 - RNA, 21 nt, synthetic construct
  source 1..21: mol_type = other RNA
ggcccagccccgcctccctaa

SEQ ID NO: 17312 - RNA, 21 nt, synthetic construct
  source 1..21: mol_type = other RNA
ggcccaggcacacaggtgtgc

SEQ ID NO: 17313 - RNA, 21 nt, synthetic construct
  source 1..21: mol_type = other RNA
ggcccagggctatgcagggtg

SEQ ID NO: 17314 - RNA, 21 nt, synthetic construct
  source 1..21: mol_type = other RNA
ggcccattgctctccttgccc

SEQ ID NO: 17315 - RNA, 21 nt, synthetic construct
  source 1..21: mol_type = other RNA
ggccccagcccctcctctctc

SEQ ID NO: 17316 - RNA, 21 nt, synthetic construct
  source 1..21: mol_type = other RNA
ggccccagcccttccgccctc

SEQ ID NO: 17317 - RNA, 21 nt, synthetic construct
  source 1..21: mol_type = other RNA
ggccccaggccacctacttgg

SEQ ID NO: 17318 - RNA, 21 nt, synthetic construct
  source 1..21: mol_type = other RNA
ggccccaggctgtcacactcc

SEQ ID NO: 17319 - RNA, 21 nt, synthetic construct
  source 1..21: mol_type = other RNA
ggcccccagcccctcctgcct

SEQ ID NO: 17320 - RNA, 21 nt, synthetic construct
  source 1..21: mol_type = other RNA
ggcccccagcctctccccatt

SEQ ID NO: 17321 - RNA, 21 nt, synthetic construct
  source 1..21: mol_type = other RNA
ggcccccagctcttctctgtt

SEQ ID NO: 17322 - RNA, 21 nt, synthetic construct
  source 1..21: mol_type = other RNA
ggcccccagtccctccaccct

SEQ ID NO: 17323 - RNA, 21 nt, synthetic construct
  source 1..21: mol_type = other RNA
ggccccctctgcacggggccc

SEQ ID NO: 17324 - RNA, 21 nt, synthetic construct
  source 1..21: mol_type = other RNA
ggccccgtgcagagggggcct

SEQ ID NO: 17325 - RNA, 21 nt, synthetic construct
  source 1..21: mol_type = other RNA
ggcccctgagtctgtcccagc

SEQ ID NO: 17326 - RNA, 21 nt, synthetic construct
  source 1..21: mol_type = other RNA
ggccccttcacagcccgagtt

SEQ ID NO: 17327 - RNA, 21 nt, synthetic construct
  source 1..21: mol_type = other RNA
ggcccgtgtcagcccctggct

SEQ ID NO: 17328 - RNA, 21 nt, synthetic construct
  source 1..21: mol_type = other RNA
ggccctcgtagctccctcccg

SEQ ID NO: 17329 - RNA, 21 nt, synthetic construct
  source 1..21: mol_type = other RNA
ggccctgcagccaggggctga

SEQ ID NO: 17330 - RNA, 21 nt, synthetic construct
  source 1..21: mol_type = other RNA
ggccctgctctgggcttctgg

SEQ ID NO: 17331 - RNA, 21 nt, synthetic construct
  source 1..21: mol_type = other RNA
ggccgcacgtgccctgggaac

SEQ ID NO: 17332 - RNA, 21 nt, synthetic construct
  source 1..21: mol_type = other RNA
ggccgcctctactccctttct

SEQ ID NO: 17333 - RNA, 21 nt, synthetic construct
  source 1..21: mol_type = other RNA
ggccgcgtcagagcagctcag

SEQ ID NO: 17334 - RNA, 21 nt, synthetic construct
  source 1..21: mol_type = other RNA
ggccggccaggccttcagtgc

SEQ ID NO: 17335 - RNA, 21 nt, synthetic construct
  source 1..21: mol_type = other RNA
ggccggcctgaccactgggca

SEQ ID NO: 17336 - RNA, 21 nt, synthetic construct
  source 1..21: mol_type = other RNA
ggccgggaatcaagagtcacc

SEQ ID NO: 17337 - RNA, 21 nt, synthetic construct
  source 1..21: mol_type = other RNA
ggccgtctggtgcgtttcact

SEQ ID NO: 17338 - RNA, 21 nt, synthetic construct
  source 1..21: mol_type = other RNA
ggcctcaggcatctttcacag

SEQ ID NO: 17339 - RNA, 21 nt, synthetic construct
  source 1..21: mol_type = other RNA
ggcctcagtgaactggagtgt

SEQ ID NO: 17340 - RNA, 21 nt, synthetic construct
  source 1..21: mol_type = other RNA
ggcctcctgggataccccgaa

SEQ ID NO: 17341 - RNA, 21 nt, synthetic construct
  source 1..21: mol_type = other RNA
ggcctcctgggttgaatgggg

SEQ ID NO: 17342 - RNA, 21 nt, synthetic construct
  source 1..21: mol_type = other RNA
ggcctctcgtggggtccaggc

SEQ ID NO: 17343 - RNA, 21 nt, synthetic construct
  source 1..21: mol_type = other RNA
ggcctctgggggatgcagggg

SEQ ID NO: 17344 - RNA, 21 nt, synthetic construct
  source 1..21: mol_type = other RNA
ggcctgaccactgggcaacca

SEQ ID NO: 17345 - RNA, 21 nt, synthetic construct
  source 1..21: mol_type = other RNA
ggcctggaccccacgagaggc

SEQ ID NO: 17346 - RNA, 21 nt, synthetic construct
  source 1..21: mol_type = other RNA
ggcctggacccctgggtctga

SEQ ID NO: 17347 - RNA, 21 nt, synthetic construct
  source 1..21: mol_type = other RNA
ggcctggactccttcatctga

SEQ ID NO: 17348 - RNA, 21 nt, synthetic construct
  source 1..21: mol_type = other RNA
ggcctggactctggagtccct

SEQ ID NO: 17349 - RNA, 21 nt, synthetic construct
  source 1..21: mol_type = other RNA
ggcctggacttctgggtctta

SEQ ID NO: 17350 - RNA, 21 nt, synthetic construct
  source 1..21: mol_type = other RNA
ggcctggagcattggggtggg

SEQ ID NO: 17351 - RNA, 21 nt, synthetic construct
  source 1..21: mol_type = other RNA
ggcctggccggcctgaccact

SEQ ID NO: 17352 - RNA, 21 nt, synthetic construct
  source 1..21: mol_type = other RNA
ggcctggcctcctgggttgaa

SEQ ID NO: 17353 - RNA, 21 nt, synthetic construct
  source 1..21: mol_type = other RNA
ggcctgggcaccagggactcc

SEQ ID NO: 17354 - RNA, 21 nt, synthetic construct
  source 1..21: mol_type = other RNA
ggcctgggcgggactcccaga

SEQ ID NO: 17355 - RNA, 21 nt, synthetic construct
  source 1..21: mol_type = other RNA
ggcctgggctcctgggtttga

SEQ ID NO: 17356 - RNA, 21 nt, synthetic construct
  source 1..21: mol_type = other RNA
ggcctggggcaagtccctcct

SEQ ID NO: 17357 - RNA, 21 nt, synthetic construct
  source 1..21: mol_type = other RNA
ggcctggggcctctgggggat

SEQ ID NO: 17358 - RNA, 21 nt, synthetic construct
  source 1..21: mol_type = other RNA
ggccttagggaagcgggaccc

SEQ ID NO: 17359 - RNA, 21 nt, synthetic construct
  source 1..21: mol_type = other RNA
ggccttatctcacaggtaaaa

SEQ ID NO: 17360 - RNA, 21 nt, synthetic construct
  source 1..21: mol_type = other RNA
ggccttcagtgctcagtggaa

SEQ ID NO: 17361 - RNA, 21 nt, synthetic construct
  source 1..21: mol_type = other RNA
ggccttcctccaccctgcata

SEQ ID NO: 17362 - RNA, 21 nt, synthetic construct
  source 1..21: mol_type = other RNA
ggccttgtggacactgggtgg

SEQ ID NO: 17363 - RNA, 21 nt, synthetic construct
  source 1..21: mol_type = other RNA
ggcctttccctttcaaggacc

SEQ ID NO: 17364 - RNA, 21 nt, synthetic construct
  source 1..21: mol_type = other RNA
ggcgataggggaggggggcaa

SEQ ID NO: 17365 - RNA, 21 nt, synthetic construct
  source 1..21: mol_type = other RNA
ggcgatgcttggggacctgcc

SEQ ID NO: 17366 - RNA, 21 nt, synthetic construct
  source 1..21: mol_type = other RNA
ggcgctcaggcttccctgtcc

SEQ ID NO: 17367 - RNA, 21 nt, synthetic construct
  source 1..21: mol_type = other RNA
ggcgcttccagtgctcagact

SEQ ID NO: 17368 - RNA, 21 nt, synthetic construct
  source 1..21: mol_type = other RNA
ggcggaagggctggggcctgg

SEQ ID NO: 17369 - RNA, 21 nt, synthetic construct
  source 1..21: mol_type = other RNA
ggcggaggaatatgtcccaga

SEQ ID NO: 17370 - RNA, 21 nt, synthetic construct
  source 1..21: mol_type = other RNA
ggcggccacgacctggtgaac

SEQ ID NO: 17371 - RNA, 21 nt, synthetic construct
  source 1..21: mol_type = other RNA
ggcgggactcccagaggggtg

SEQ ID NO: 17372 - RNA, 21 nt, synthetic construct
  source 1..21: mol_type = other RNA
ggcgggagggagctacgaggg

SEQ ID NO: 17373 - RNA, 21 nt, synthetic construct
  source 1..21: mol_type = other RNA
ggcggggctgggcctggaccc

SEQ ID NO: 17374 - RNA, 21 nt, synthetic construct
  source 1..21: mol_type = other RNA
ggcgtatcttaaacagccagt

SEQ ID NO: 17375 - RNA, 21 nt, synthetic construct
  source 1..21: mol_type = other RNA
ggctactggccttatctcaca

SEQ ID NO: 17376 - RNA, 21 nt, synthetic construct
  source 1..21: mol_type = other RNA
ggctagagtaggaggggctgg

SEQ ID NO: 17377 - RNA, 21 nt, synthetic construct
  source 1..21: mol_type = other RNA
ggctagggggttgggggctag

SEQ ID NO: 17378 - RNA, 21 nt, synthetic construct
  source 1..21: mol_type = other RNA
ggctatctgcaaacaggaagt

SEQ ID NO: 17379 - RNA, 21 nt, synthetic construct
  source 1..21: mol_type = other RNA
ggctatgcagggtggaggaag

SEQ ID NO: 17380 - RNA, 21 nt, synthetic construct
  source 1..21: mol_type = other RNA
ggctcagtctgaagagcagag

SEQ ID NO: 17381 - RNA, 21 nt, synthetic construct
  source 1..21: mol_type = other RNA
ggctccagcccctcctactct

SEQ ID NO: 17382 - RNA, 21 nt, synthetic construct
  source 1..21: mol_type = other RNA
ggctccctctggagtcccgac

SEQ ID NO: 17383 - RNA, 21 nt, synthetic construct
  source 1..21: mol_type = other RNA
ggctccgggacctgaactgga

SEQ ID NO: 17384 - RNA, 21 nt, synthetic construct
  source 1..21: mol_type = other RNA
ggctcctgggtttgagagagg

SEQ ID NO: 17385 - RNA, 21 nt, synthetic construct
  source 1..21: mol_type = other RNA
ggctcgtttatttccacccag

SEQ ID NO: 17386 - RNA, 21 nt, synthetic construct
  source 1..21: mol_type = other RNA
ggctctcctgccccttcccta

SEQ ID NO: 17387 - RNA, 21 nt, synthetic construct
  source 1..21: mol_type = other RNA
ggctctgaaggaggaggggct

SEQ ID NO: 17388 - RNA, 21 nt, synthetic construct
  source 1..21: mol_type = other RNA
ggctctgctcttcagactgag

SEQ ID NO: 17389 - RNA, 21 nt, synthetic construct
  source 1..21: mol_type = other RNA
ggctcttcacctttctagtcc

SEQ ID NO: 17390 - RNA, 21 nt, synthetic construct
  source 1..21: mol_type = other RNA
ggctgaacagagaagagctgg

SEQ ID NO: 17391 - RNA, 21 nt, synthetic construct
  source 1..21: mol_type = other RNA
ggctgacacgggccaccgttt

SEQ ID NO: 17392 - RNA, 21 nt, synthetic construct
  source 1..21: mol_type = other RNA
ggctgcagggccccgtgcaga

SEQ ID NO: 17393 - RNA, 21 nt, synthetic construct
  source 1..21: mol_type = other RNA
ggctgccttttgggtggattc

SEQ ID NO: 17394 - RNA, 21 nt, synthetic construct
  source 1..21: mol_type = other RNA
ggctggaacctcttccctagt

SEQ ID NO: 17395 - RNA, 21 nt, synthetic construct
  source 1..21: mol_type = other RNA
ggctggagccaggattcttag

SEQ ID NO: 17396 - RNA, 21 nt, synthetic construct
  source 1..21: mol_type = other RNA
ggctggctactggccttatct

SEQ ID NO: 17397 - RNA, 21 nt, synthetic construct
  source 1..21: mol_type = other RNA
ggctgggcctggacccctggg

SEQ ID NO: 17398 - RNA, 21 nt, synthetic construct
  source 1..21: mol_type = other RNA
ggctggggcctggactcctgg

SEQ ID NO: 17399 - RNA, 21 nt, synthetic construct
  source 1..21: mol_type = other RNA
ggctggggcctggactcgtgg

SEQ ID NO: 17400 - RNA, 21 nt, synthetic construct
  source 1..21: mol_type = other RNA
ggctggggcctggcctcctgg

SEQ ID NO: 17401 - RNA, 21 nt, synthetic construct
  source 1..21: mol_type = other RNA
ggctgggggccaggactcctg

SEQ ID NO: 17402 - RNA, 21 nt, synthetic construct
  source 1..21: mol_type = other RNA
ggctgggggcctggactcctt

SEQ ID NO: 17403 - RNA, 21 nt, synthetic construct
  source 1..21: mol_type = other RNA
ggctgggggcctggacttctg

SEQ ID NO: 17404 - RNA, 21 nt, synthetic construct
  source 1..21: mol_type = other RNA
ggctggggtggcctctcgtgg

SEQ ID NO: 17405 - RNA, 21 nt, synthetic construct
  source 1..21: mol_type = other RNA
ggctggggttcagagaggagg

SEQ ID NO: 17406 - RNA, 21 nt, synthetic construct
  source 1..21: mol_type = other RNA
ggctgggtttaaggcaggagg

SEQ ID NO: 17407 - RNA, 21 nt, synthetic construct
  source 1..21: mol_type = other RNA
ggctggtaccctgcccccatt

SEQ ID NO: 17408 - RNA, 21 nt, synthetic construct
  source 1..21: mol_type = other RNA
ggctgtcacactccagttcac

SEQ ID NO: 17409 - RNA, 21 nt, synthetic construct
  source 1..21: mol_type = other RNA
ggctgtcctgggcaaacagca

SEQ ID NO: 17410 - RNA, 21 nt, synthetic construct
  source 1..21: mol_type = other RNA
ggctgtgaaggggccgcacgt

SEQ ID NO: 17411 - RNA, 21 nt, synthetic construct
  source 1..21: mol_type = other RNA
ggctgtggtgaggaggggggt

SEQ ID NO: 17412 - RNA, 21 nt, synthetic construct
  source 1..21: mol_type = other RNA
ggctgtgtttctcgtcctgca

SEQ ID NO: 17413 - RNA, 21 nt, synthetic construct
  source 1..21: mol_type = other RNA
ggctgttcccaagttcttagg

SEQ ID NO: 17414 - RNA, 21 nt, synthetic construct
  source 1..21: mol_type = other RNA
ggctgttgggtcattttcccc

SEQ ID NO: 17415 - RNA, 21 nt, synthetic construct
  source 1..21: mol_type = other RNA
ggctgtttaagatacgcctgg

SEQ ID NO: 17416 - RNA, 21 nt, synthetic construct
  source 1..21: mol_type = other RNA
ggcttccctgtcccccttcct

SEQ ID NO: 17417 - RNA, 21 nt, synthetic construct
  source 1..21: mol_type = other RNA
ggcttcgttcctgcagagtat

SEQ ID NO: 17418 - RNA, 21 nt, synthetic construct
  source 1..21: mol_type = other RNA
ggcttctcatctgggtgcggg

SEQ ID NO: 17419 - RNA, 21 nt, synthetic construct
  source 1..21: mol_type = other RNA
ggcttctgggtttgagtcctt

SEQ ID NO: 17420 - RNA, 21 nt, synthetic construct
  source 1..21: mol_type = other RNA
ggcttgccaaggactcaaacc

SEQ ID NO: 17421 - RNA, 21 nt, synthetic construct
  source 1..21: mol_type = other RNA
ggcttttgtccccccaagttt

SEQ ID NO: 17422 - RNA, 21 nt, synthetic construct
  source 1..21: mol_type = other RNA
gggaaaatgacccaacagcct

SEQ ID NO: 17423 - RNA, 21 nt, synthetic construct
  source 1..21: mol_type = other RNA
gggaaaggcccattgctctcc

SEQ ID NO: 17424 - RNA, 21 nt, synthetic construct
  source 1..21: mol_type = other RNA
gggaacagccacagcaggggg

SEQ ID NO: 17425 - RNA, 21 nt, synthetic construct
  source 1..21: mol_type = other RNA
gggaaccccacatggtacctg

SEQ ID NO: 17426 - RNA, 21 nt, synthetic construct
  source 1..21: mol_type = other RNA
gggaacgggatgaactcggct

SEQ ID NO: 17427 - RNA, 21 nt, synthetic construct
  source 1..21: mol_type = other RNA
gggaacggggatgcaggggaa

SEQ ID NO: 17428 - RNA, 21 nt, synthetic construct
  source 1..21: mol_type = other RNA
gggaacggggctcagtctgaa

SEQ ID NO: 17429 - RNA, 21 nt, synthetic construct
  source 1..21: mol_type = other RNA
gggaagaatgagaaacggtgg

SEQ ID NO: 17430 - RNA, 21 nt, synthetic construct
  source 1..21: mol_type = other RNA
gggaagaggttccagcccctc

SEQ ID NO: 17431 - RNA, 21 nt, synthetic construct
  source 1..21: mol_type = other RNA
gggaagcctgagcgcctctcc

SEQ ID NO: 17432 - RNA, 21 nt, synthetic construct
  source 1..21: mol_type = other RNA
gggaagcgggaccctgctctg

SEQ ID NO: 17433 - RNA, 21 nt, synthetic construct
  source 1..21: mol_type = other RNA
gggaagggagggggcttctca

SEQ ID NO: 17434 - RNA, 21 nt, synthetic construct
  source 1..21: mol_type = other RNA
gggaaggggcaggagagccag

SEQ ID NO: 17435 - RNA, 21 nt, synthetic construct
  source 1..21: mol_type = other RNA
gggaagggggatgcaggggaa

SEQ ID NO: 17436 - RNA, 21 nt, synthetic construct
  source 1..21: mol_type = other RNA
gggaagtgtaaggaagctgca

SEQ ID NO: 17437 - RNA, 21 nt, synthetic construct
  source 1..21: mol_type = other RNA
gggaatcaagagtcacccaga

SEQ ID NO: 17438 - RNA, 21 nt, synthetic construct
  source 1..21: mol_type = other RNA
gggaatccctcctctctgaac

SEQ ID NO: 17439 - RNA, 21 nt, synthetic construct
  source 1..21: mol_type = other RNA
gggacaaaagccgaagtccag

SEQ ID NO: 17440 - RNA, 21 nt, synthetic construct
  source 1..21: mol_type = other RNA
gggacacggtgctaggacagt

SEQ ID NO: 17441 - RNA, 21 nt, synthetic construct
  source 1..21: mol_type = other RNA
gggacagactcaggggcctgg

SEQ ID NO: 17442 - RNA, 21 nt, synthetic construct
  source 1..21: mol_type = other RNA
gggacagggaagcctgagcgc

SEQ ID NO: 17443 - RNA, 21 nt, synthetic construct
  source 1..21: mol_type = other RNA
gggacatattcctccgcccag

SEQ ID NO: 17444 - RNA, 21 nt, synthetic construct
  source 1..21: mol_type = other RNA
gggaccctgctctgggcggag

SEQ ID NO: 17445 - RNA, 21 nt, synthetic construct
  source 1..21: mol_type = other RNA
gggacctgaactggagctgag

SEQ ID NO: 17446 - RNA, 21 nt, synthetic construct
  source 1..21: mol_type = other RNA
gggacctgcctggagaaggat

SEQ ID NO: 17447 - RNA, 21 nt, synthetic construct
  source 1..21: mol_type = other RNA
gggactagaaaggtgaagagc

SEQ ID NO: 17448 - RNA, 21 nt, synthetic construct
  source 1..21: mol_type = other RNA
gggactccagagggagccacg

SEQ ID NO: 17449 - RNA, 21 nt, synthetic construct
  source 1..21: mol_type = other RNA
gggactccagagtccaggccc

SEQ ID NO: 17450 - RNA, 21 nt, synthetic construct
  source 1..21: mol_type = other RNA
gggactcccagaggggtgaga

SEQ ID NO: 17451 - RNA, 21 nt, synthetic construct
  source 1..21: mol_type = other RNA
gggactctttaaggaaagaag

SEQ ID NO: 17452 - RNA, 21 nt, synthetic construct
  source 1..21: mol_type = other RNA
gggactgggggcctggactcc

SEQ ID NO: 17453 - RNA, 21 nt, synthetic construct
  source 1..21: mol_type = other RNA
gggacttgccccaggccttgt

SEQ ID NO: 17454 - RNA, 21 nt, synthetic construct
  source 1..21: mol_type = other RNA
gggacttggggggtaatttat

SEQ ID NO: 17455 - RNA, 21 nt, synthetic construct
  source 1..21: mol_type = other RNA
gggagaggctgggggcctgga

SEQ ID NO: 17456 - RNA, 21 nt, synthetic construct
  source 1..21: mol_type = other RNA
gggagagggtagcgcagggtg

SEQ ID NO: 17457 - RNA, 21 nt, synthetic construct
  source 1..21: mol_type = other RNA
gggagccacgaaaacagatcc

SEQ ID NO: 17458 - RNA, 21 nt, synthetic construct
  source 1..21: mol_type = other RNA
gggagctacgagggccaagag

SEQ ID NO: 17459 - RNA, 21 nt, synthetic construct
  source 1..21: mol_type = other RNA
gggagctgggtttgggtcagg

SEQ ID NO: 17460 - RNA, 21 nt, synthetic construct
  source 1..21: mol_type = other RNA
gggaggaggggctggggcctg

SEQ ID NO: 17461 - RNA, 21 nt, synthetic construct
  source 1..21: mol_type = other RNA
gggagggagctacgagggcca

SEQ ID NO: 17462 - RNA, 21 nt, synthetic construct
  source 1..21: mol_type = other RNA
gggagggggcttctcatctgg

SEQ ID NO: 17463 - RNA, 21 nt, synthetic construct
  source 1..21: mol_type = other RNA
gggaggggggcaaggagagca

SEQ ID NO: 17464 - RNA, 21 nt, synthetic construct
  source 1..21: mol_type = other RNA
gggaggggttgggcctggact

SEQ ID NO: 17465 - RNA, 21 nt, synthetic construct
  source 1..21: mol_type = other RNA
gggagtagaggcggccacgac

SEQ ID NO: 17466 - RNA, 21 nt, synthetic construct
  source 1..21: mol_type = other RNA
gggagtcccgcccaggcccct

SEQ ID NO: 17467 - RNA, 21 nt, synthetic construct
  source 1..21: mol_type = other RNA
gggagttttccacacggacac

SEQ ID NO: 17468 - RNA, 21 nt, synthetic construct
  source 1..21: mol_type = other RNA
gggataaattaccccccaagt

SEQ ID NO: 17469 - RNA, 21 nt, synthetic construct
  source 1..21: mol_type = other RNA
gggataccccgaagagtgagt

SEQ ID NO: 17470 - RNA, 21 nt, synthetic construct
  source 1..21: mol_type = other RNA
gggatgaactcggctcgttta

SEQ ID NO: 17471 - RNA, 21 nt, synthetic construct
  source 1..21: mol_type = other RNA
gggatgcaggggaacggggat

SEQ ID NO: 17472 - RNA, 21 nt, synthetic construct
  source 1..21: mol_type = other RNA
gggatgcaggggaacggggct

SEQ ID NO: 17473 - RNA, 21 nt, synthetic construct
  source 1..21: mol_type = other RNA
gggatgcaggggaagggggat

SEQ ID NO: 17474 - RNA, 21 nt, synthetic construct
  source 1..21: mol_type = other RNA
gggatgcctgtactgggcagg

SEQ ID NO: 17475 - RNA, 21 nt, synthetic construct
  source 1..21: mol_type = other RNA
gggatgcgtgacctgcccggt

SEQ ID NO: 17476 - RNA, 21 nt, synthetic construct
  source 1..21: mol_type = other RNA
gggatggttggtcactgtctc

SEQ ID NO: 17477 - RNA, 21 nt, synthetic construct
  source 1..21: mol_type = other RNA
gggattcccttctcaggttac

SEQ ID NO: 17478 - RNA, 21 nt, synthetic construct
  source 1..21: mol_type = other RNA
gggcaaacagcataagctggt

SEQ ID NO: 17479 - RNA, 21 nt, synthetic construct
  source 1..21: mol_type = other RNA
gggcaaccaggcgtatcttaa

SEQ ID NO: 17480 - RNA, 21 nt, synthetic construct
  source 1..21: mol_type = other RNA
gggcaaggagagcaatgggcc

SEQ ID NO: 17481 - RNA, 21 nt, synthetic construct
  source 1..21: mol_type = other RNA
gggcaagtccctcctccgacc

SEQ ID NO: 17482 - RNA, 21 nt, synthetic construct
  source 1..21: mol_type = other RNA
gggcaccagggactccagagt

SEQ ID NO: 17483 - RNA, 21 nt, synthetic construct
  source 1..21: mol_type = other RNA
gggcacgtgcggccccttcac

SEQ ID NO: 17484 - RNA, 21 nt, synthetic construct
  source 1..21: mol_type = other RNA
gggcagctttggagaggtgag

SEQ ID NO: 17485 - RNA, 21 nt, synthetic construct
  source 1..21: mol_type = other RNA
gggcaggagagccaggggcat

SEQ ID NO: 17486 - RNA, 21 nt, synthetic construct
  source 1..21: mol_type = other RNA
gggcagggtaccagcctcacc

SEQ ID NO: 17487 - RNA, 21 nt, synthetic construct
  source 1..21: mol_type = other RNA
gggcaggtccttgaaagggaa

SEQ ID NO: 17488 - RNA, 21 nt, synthetic construct
  source 1..21: mol_type = other RNA
gggcatgagatggtggacgag

SEQ ID NO: 17489 - RNA, 21 nt, synthetic construct
  source 1..21: mol_type = other RNA
gggccaagagcatgaggtcat

SEQ ID NO: 17490 - RNA, 21 nt, synthetic construct
  source 1..21: mol_type = other RNA
gggccaccgtttctcattctt

SEQ ID NO: 17491 - RNA, 21 nt, synthetic construct
  source 1..21: mol_type = other RNA
gggccaggactcctggctctg

SEQ ID NO: 17492 - RNA, 21 nt, synthetic construct
  source 1..21: mol_type = other RNA
gggcccacggcttcgttcctg

SEQ ID NO: 17493 - RNA, 21 nt, synthetic construct
  source 1..21: mol_type = other RNA
gggcccaggcacacaggtgtg

SEQ ID NO: 17494 - RNA, 21 nt, synthetic construct
  source 1..21: mol_type = other RNA
gggcccagggctatgcagggt

SEQ ID NO: 17495 - RNA, 21 nt, synthetic construct
  source 1..21: mol_type = other RNA
gggccccaggctgtcacactc

SEQ ID NO: 17496 - RNA, 21 nt, synthetic construct
  source 1..21: mol_type = other RNA
gggccccgtgcagagggggcc

SEQ ID NO: 17497 - RNA, 21 nt, synthetic construct
  source 1..21: mol_type = other RNA
gggccctgcagccaggggctg

SEQ ID NO: 17498 - RNA, 21 nt, synthetic construct
  source 1..21: mol_type = other RNA
gggccgcacgtgccctgggaa

SEQ ID NO: 17499 - RNA, 21 nt, synthetic construct
  source 1..21: mol_type = other RNA
gggcctcagtgaactggagtg

SEQ ID NO: 17500 - RNA, 21 nt, synthetic construct
  source 1..21: mol_type = other RNA
gggcctctgggggatgcaggg

SEQ ID NO: 17501 - RNA, 21 nt, synthetic construct
  source 1..21: mol_type = other RNA
gggcctggacccctgggtctg

SEQ ID NO: 17502 - RNA, 21 nt, synthetic construct
  source 1..21: mol_type = other RNA
gggcctggactccttcatctg

SEQ ID NO: 17503 - RNA, 21 nt, synthetic construct
  source 1..21: mol_type = other RNA
gggcctggactctggagtccc

SEQ ID NO: 17504 - RNA, 21 nt, synthetic construct
  source 1..21: mol_type = other RNA
gggcctggacttctgggtctt

SEQ ID NO: 17505 - RNA, 21 nt, synthetic construct
  source 1..21: mol_type = other RNA
gggcctggcctcctgggttga

SEQ ID NO: 17506 - RNA, 21 nt, synthetic construct
  source 1..21: mol_type = other RNA
gggcctgggcgggactcccag

SEQ ID NO: 17507 - RNA, 21 nt, synthetic construct
  source 1..21: mol_type = other RNA
gggcctgggctcctgggtttg

SEQ ID NO: 17508 - RNA, 21 nt, synthetic construct
  source 1..21: mol_type = other RNA
gggccttagggaagcgggacc

SEQ ID NO: 17509 - RNA, 21 nt, synthetic construct
  source 1..21: mol_type = other RNA
gggcctttccctttcaaggac

SEQ ID NO: 17510 - RNA, 21 nt, synthetic construct
  source 1..21: mol_type = other RNA
gggcgatgcttggggacctgc

SEQ ID NO: 17511 - RNA, 21 nt, synthetic construct
  source 1..21: mol_type = other RNA
gggcggaagggctggggcctg

SEQ ID NO: 17512 - RNA, 21 nt, synthetic construct
  source 1..21: mol_type = other RNA
gggcggaggaatatgtcccag

SEQ ID NO: 17513 - RNA, 21 nt, synthetic construct
  source 1..21: mol_type = other RNA
gggcgggactcccagaggggt

SEQ ID NO: 17514 - RNA, 21 nt, synthetic construct
  source 1..21: mol_type = other RNA
gggctagagtaggaggggctg

SEQ ID NO: 17515 - RNA, 21 nt, synthetic construct
  source 1..21: mol_type = other RNA
gggctatgcagggtggaggaa

SEQ ID NO: 17516 - RNA, 21 nt, synthetic construct
  source 1..21: mol_type = other RNA
gggctcagtctgaagagcaga

SEQ ID NO: 17517 - RNA, 21 nt, synthetic construct
  source 1..21: mol_type = other RNA
gggctccgggacctgaactgg

SEQ ID NO: 17518 - RNA, 21 nt, synthetic construct
  source 1..21: mol_type = other RNA
gggctcctgggtttgagagag

SEQ ID NO: 17519 - RNA, 21 nt, synthetic construct
  source 1..21: mol_type = other RNA
gggctgaacagagaagagctg

SEQ ID NO: 17520 - RNA, 21 nt, synthetic construct
  source 1..21: mol_type = other RNA
gggctgacacgggccaccgtt

SEQ ID NO: 17521 - RNA, 21 nt, synthetic construct
  source 1..21: mol_type = other RNA
gggctggaacctcttccctag

SEQ ID NO: 17522 - RNA, 21 nt, synthetic construct
  source 1..21: mol_type = other RNA
gggctggagccaggattctta

SEQ ID NO: 17523 - RNA, 21 nt, synthetic construct
  source 1..21: mol_type = other RNA
gggctggctactggccttatc

SEQ ID NO: 17524 - RNA, 21 nt, synthetic construct
  source 1..21: mol_type = other RNA
gggctgggcctggacccctgg

SEQ ID NO: 17525 - RNA, 21 nt, synthetic construct
  source 1..21: mol_type = other RNA
gggctggggcctggactcctg

SEQ ID NO: 17526 - RNA, 21 nt, synthetic construct
  source 1..21: mol_type = other RNA
gggctggggcctggactcgtg

SEQ ID NO: 17527 - RNA, 21 nt, synthetic construct
  source 1..21: mol_type = other RNA
gggctggggcctggcctcctg

SEQ ID NO: 17528 - RNA, 21 nt, synthetic construct
  source 1..21: mol_type = other RNA
gggctgggggccaggactcct

SEQ ID NO: 17529 - RNA, 21 nt, synthetic construct
  source 1..21: mol_type = other RNA
gggctgggggcctggacttct

SEQ ID NO: 17530 - RNA, 21 nt, synthetic construct
  source 1..21: mol_type = other RNA
gggctggggtggcctctcgtg

SEQ ID NO: 17531 - RNA, 21 nt, synthetic construct
  source 1..21: mol_type = other RNA
gggctggggttcagagaggag

SEQ ID NO: 17532 - RNA, 21 nt, synthetic construct
  source 1..21: mol_type = other RNA
gggctgtgaaggggccgcacg

SEQ ID NO: 17533 - RNA, 21 nt, synthetic construct
  source 1..21: mol_type = other RNA
gggctgtggtgaggagggggg

SEQ ID NO: 17534 - RNA, 21 nt, synthetic construct
  source 1..21: mol_type = other RNA
gggctgtgtttctcgtcctgc

SEQ ID NO: 17535 - RNA, 21 nt, synthetic construct
  source 1..21: mol_type = other RNA
gggcttctcatctgggtgcgg

SEQ ID NO: 17536 - RNA, 21 nt, synthetic construct
  source 1..21: mol_type = other RNA
gggcttctgggtttgagtcct

SEQ ID NO: 17537 - RNA, 21 nt, synthetic construct
  source 1..21: mol_type = other RNA
gggcttgccaaggactcaaac

SEQ ID NO: 17538 - RNA, 21 nt, synthetic construct
  source 1..21: mol_type = other RNA
ggggaaaatgacccaacagcc

SEQ ID NO: 17539 - RNA, 21 nt, synthetic construct
  source 1..21: mol_type = other RNA
ggggaacggggatgcagggga

SEQ ID NO: 17540 - RNA, 21 nt, synthetic construct
  source 1..21: mol_type = other RNA
ggggaacggggctcagtctga

SEQ ID NO: 17541 - RNA, 21 nt, synthetic construct
  source 1..21: mol_type = other RNA
ggggaagggagggggcttctc

SEQ ID NO: 17542 - RNA, 21 nt, synthetic construct
  source 1..21: mol_type = other RNA
ggggaagggggatgcagggga

SEQ ID NO: 17543 - RNA, 21 nt, synthetic construct
  source 1..21: mol_type = other RNA
ggggacaaaagccgaagtcca

SEQ ID NO: 17544 - RNA, 21 nt, synthetic construct
  source 1..21: mol_type = other RNA
ggggacagggaagcctgagcg

SEQ ID NO: 17545 - RNA, 21 nt, synthetic construct
  source 1..21: mol_type = other RNA
ggggacctgcctggagaagga

SEQ ID NO: 17546 - RNA, 21 nt, synthetic construct
  source 1..21: mol_type = other RNA
ggggactagaaaggtgaagag

SEQ ID NO: 17547 - RNA, 21 nt, synthetic construct
  source 1..21: mol_type = other RNA
ggggactctttaaggaaagaa

SEQ ID NO: 17548 - RNA, 21 nt, synthetic construct
  source 1..21: mol_type = other RNA
ggggagaggctgggggcctgg

SEQ ID NO: 17549 - RNA, 21 nt, synthetic construct
  source 1..21: mol_type = other RNA
ggggagctgggtttgggtcag

SEQ ID NO: 17550 - RNA, 21 nt, synthetic construct
  source 1..21: mol_type = other RNA
ggggaggggggcaaggagagc

SEQ ID NO: 17551 - RNA, 21 nt, synthetic construct
  source 1..21: mol_type = other RNA
ggggaggggttgggcctggac

SEQ ID NO: 17552 - RNA, 21 nt, synthetic construct
  source 1..21: mol_type = other RNA
ggggatgcaggggaacgggga

SEQ ID NO: 17553 - RNA, 21 nt, synthetic construct
  source 1..21: mol_type = other RNA
ggggatgcaggggaacggggc

SEQ ID NO: 17554 - RNA, 21 nt, synthetic construct
  source 1..21: mol_type = other RNA
ggggatgcaggggaaggggga

SEQ ID NO: 17555 - RNA, 21 nt, synthetic construct
  source 1..21: mol_type = other RNA
ggggatgcgtgacctgcccgg

SEQ ID NO: 17556 - RNA, 21 nt, synthetic construct
  source 1..21: mol_type = other RNA
ggggcaaggagagcaatgggc

SEQ ID NO: 17557 - RNA, 21 nt, synthetic construct
  source 1..21: mol_type = other RNA
ggggcaagtccctcctccgac

SEQ ID NO: 17558 - RNA, 21 nt, synthetic construct
  source 1..21: mol_type = other RNA
ggggcaggagagccaggggca

SEQ ID NO: 17559 - RNA, 21 nt, synthetic construct
  source 1..21: mol_type = other RNA
ggggcagggtaccagcctcac

SEQ ID NO: 17560 - RNA, 21 nt, synthetic construct
  source 1..21: mol_type = other RNA
ggggcatgagatggtggacga

SEQ ID NO: 17561 - RNA, 21 nt, synthetic construct
  source 1..21: mol_type = other RNA
ggggccaggactcctggctct

SEQ ID NO: 17562 - RNA, 21 nt, synthetic construct
  source 1..21: mol_type = other RNA
ggggcccaggcacacaggtgt

SEQ ID NO: 17563 - RNA, 21 nt, synthetic construct
  source 1..21: mol_type = other RNA
ggggccctgcagccaggggct

SEQ ID NO: 17564 - RNA, 21 nt, synthetic construct
  source 1..21: mol_type = other RNA
ggggccgcacgtgccctggga

SEQ ID NO: 17565 - RNA, 21 nt, synthetic construct
  source 1..21: mol_type = other RNA
ggggcctcagtgaactggagt

SEQ ID NO: 17566 - RNA, 21 nt, synthetic construct
  source 1..21: mol_type = other RNA
ggggcctctgggggatgcagg

SEQ ID NO: 17567 - RNA, 21 nt, synthetic construct
  source 1..21: mol_type = other RNA
ggggcctggactccttcatct

SEQ ID NO: 17568 - RNA, 21 nt, synthetic construct
  source 1..21: mol_type = other RNA
ggggcctggacttctgggtct

SEQ ID NO: 17569 - RNA, 21 nt, synthetic construct
  source 1..21: mol_type = other RNA
ggggcctggcctcctgggttg

SEQ ID NO: 17570 - RNA, 21 nt, synthetic construct
  source 1..21: mol_type = other RNA
ggggcctgggcgggactccca

SEQ ID NO: 17571 - RNA, 21 nt, synthetic construct
  source 1..21: mol_type = other RNA
ggggcctgggctcctgggttt

SEQ ID NO: 17572 - RNA, 21 nt, synthetic construct
  source 1..21: mol_type = other RNA
ggggcgatgcttggggacctg

SEQ ID NO: 17573 - RNA, 21 nt, synthetic construct
  source 1..21: mol_type = other RNA
ggggctagagtaggaggggct

SEQ ID NO: 17574 - RNA, 21 nt, synthetic construct
  source 1..21: mol_type = other RNA
ggggctcagtctgaagagcag

SEQ ID NO: 17575 - RNA, 21 nt, synthetic construct
  source 1..21: mol_type = other RNA
ggggctgacacgggccaccgt

SEQ ID NO: 17576 - RNA, 21 nt, synthetic construct
  source 1..21: mol_type = other RNA
ggggctggaacctcttcccta

SEQ ID NO: 17577 - RNA, 21 nt, synthetic construct
  source 1..21: mol_type = other RNA
ggggctggagccaggattctt

SEQ ID NO: 17578 - RNA, 21 nt, synthetic construct
  source 1..21: mol_type = other RNA
ggggctggctactggccttat

SEQ ID NO: 17579 - RNA, 21 nt, synthetic construct
  source 1..21: mol_type = other RNA
ggggctgggcctggacccctg

SEQ ID NO: 17580 - RNA, 21 nt, synthetic construct
  source 1..21: mol_type = other RNA
ggggctggggcctggactcct

SEQ ID NO: 17581 - RNA, 21 nt, synthetic construct
  source 1..21: mol_type = other RNA
ggggctggggcctggactcgt

SEQ ID NO: 17582 - RNA, 21 nt, synthetic construct
  source 1..21: mol_type = other RNA
ggggctgggggccaggactcc

SEQ ID NO: 17583 - RNA, 21 nt, synthetic construct
  source 1..21: mol_type = other RNA
ggggctgggggcctggacttc

SEQ ID NO: 17584 - RNA, 21 nt, synthetic construct
  source 1..21: mol_type = other RNA
ggggctgtgtttctcgtcctg

SEQ ID NO: 17585 - RNA, 21 nt, synthetic construct
  source 1..21: mol_type = other RNA
ggggcttctcatctgggtgcg

SEQ ID NO: 17586 - RNA, 21 nt, synthetic construct
  source 1..21: mol_type = other RNA
gggggacaaaagccgaagtcc

SEQ ID NO: 17587 - RNA, 21 nt, synthetic construct
  source 1..21: mol_type = other RNA
gggggacagggaagcctgagc

SEQ ID NO: 17588 - RNA, 21 nt, synthetic construct
  source 1..21: mol_type = other RNA
gggggatgcaggggaacgggg

SEQ ID NO: 17589 - RNA, 21 nt, synthetic construct
  source 1..21: mol_type = other RNA
gggggatgcaggggaaggggg

SEQ ID NO: 17590 - RNA, 21 nt, synthetic construct
  source 1..21: mol_type = other RNA
gggggatgcgtgacctgcccg

SEQ ID NO: 17591 - RNA, 21 nt, synthetic construct
  source 1..21: mol_type = other RNA
gggggcaaggagagcaatggg

SEQ ID NO: 17592 - RNA, 21 nt, synthetic construct
  source 1..21: mol_type = other RNA
gggggcagggtaccagcctca

SEQ ID NO: 17593 - RNA, 21 nt, synthetic construct
  source 1..21: mol_type = other RNA
gggggccaggactcctggctc

SEQ ID NO: 17594 - RNA, 21 nt, synthetic construct
  source 1..21: mol_type = other RNA
gggggcctcagtgaactggag

SEQ ID NO: 17595 - RNA, 21 nt, synthetic construct
  source 1..21: mol_type = other RNA
gggggcctggactccttcatc

SEQ ID NO: 17596 - RNA, 21 nt, synthetic construct
  source 1..21: mol_type = other RNA
gggggcctggacttctgggtc

SEQ ID NO: 17597 - RNA, 21 nt, synthetic construct
  source 1..21: mol_type = other RNA
gggggcctgggctcctgggtt

SEQ ID NO: 17598 - RNA, 21 nt, synthetic construct
  source 1..21: mol_type = other RNA
gggggcgatgcttggggacct

SEQ ID NO: 17599 - RNA, 21 nt, synthetic construct
  source 1..21: mol_type = other RNA
gggggctagagtaggaggggc

SEQ ID NO: 17600 - RNA, 21 nt, synthetic construct
  source 1..21: mol_type = other RNA
gggggcttctcatctgggtgc

SEQ ID NO: 17601 - RNA, 21 nt, synthetic construct
  source 1..21: mol_type = other RNA
ggggggacaaaagccgaagtc

SEQ ID NO: 17602 - RNA, 21 nt, synthetic construct
  source 1..21: mol_type = other RNA
ggggggatgcgtgacctgccc

SEQ ID NO: 17603 - RNA, 21 nt, synthetic construct
  source 1..21: mol_type = other RNA
ggggggcaaggagagcaatgg

SEQ ID NO: 17604 - RNA, 21 nt, synthetic construct
  source 1..21: mol_type = other RNA
ggggggcgatgcttggggacc

SEQ ID NO: 17605 - RNA, 21 nt, synthetic construct
  source 1..21: mol_type = other RNA
ggggggtaatttatcccgtgg

SEQ ID NO: 17606 - RNA, 21 nt, synthetic construct
  source 1..21: mol_type = other RNA
ggggggtgtccgtgtggaaaa

SEQ ID NO: 17607 - RNA, 21 nt, synthetic construct
  source 1..21: mol_type = other RNA
gggggtaatttatcccgtgga

SEQ ID NO: 17608 - RNA, 21 nt, synthetic construct
  source 1..21: mol_type = other RNA
gggggtcggaggagggacttg

SEQ ID NO: 17609 - RNA, 21 nt, synthetic construct
  source 1..21: mol_type = other RNA
gggggtgtccgtgtggaaaac

SEQ ID NO: 17610 - RNA, 21 nt, synthetic construct
  source 1..21: mol_type = other RNA
gggggttgggggctagagtag

SEQ ID NO: 17611 - RNA, 21 nt, synthetic construct
  source 1..21: mol_type = other RNA
gggggttttgccgtgtctaac

SEQ ID NO: 17612 - RNA, 21 nt, synthetic construct
  source 1..21: mol_type = other RNA
ggggtaatttatcccgtggat

SEQ ID NO: 17613 - RNA, 21 nt, synthetic construct
  source 1..21: mol_type = other RNA
ggggtaccctaagaacttggg

SEQ ID NO: 17614 - RNA, 21 nt, synthetic construct
  source 1..21: mol_type = other RNA
ggggtatcccaggaggcctgg

SEQ ID NO: 17615 - RNA, 21 nt, synthetic construct
  source 1..21: mol_type = other RNA
ggggtccaaaacttgggggga

SEQ ID NO: 17616 - RNA, 21 nt, synthetic construct
  source 1..21: mol_type = other RNA
ggggtccaggccaagtaggtg

SEQ ID NO: 17617 - RNA, 21 nt, synthetic construct
  source 1..21: mol_type = other RNA
ggggtccaggcccagccccgc

SEQ ID NO: 17618 - RNA, 21 nt, synthetic construct
  source 1..21: mol_type = other RNA
ggggtcggaggagggacttgc

SEQ ID NO: 17619 - RNA, 21 nt, synthetic construct
  source 1..21: mol_type = other RNA
ggggtgaccagcttatgctgt

SEQ ID NO: 17620 - RNA, 21 nt, synthetic construct
  source 1..21: mol_type = other RNA
ggggtgactgcttggcaaact

SEQ ID NO: 17621 - RNA, 21 nt, synthetic construct
  source 1..21: mol_type = other RNA
ggggtgagacagctgcacacc

SEQ ID NO: 17622 - RNA, 21 nt, synthetic construct
  source 1..21: mol_type = other RNA
ggggtgcaggaatgggggcag

SEQ ID NO: 17623 - RNA, 21 nt, synthetic construct
  source 1..21: mol_type = other RNA
ggggtggcctctcgtggggtc

SEQ ID NO: 17624 - RNA, 21 nt, synthetic construct
  source 1..21: mol_type = other RNA
ggggtgggctggggttcagag

SEQ ID NO: 17625 - RNA, 21 nt, synthetic construct
  source 1..21: mol_type = other RNA
ggggtggtttccgagcttgac

SEQ ID NO: 17626 - RNA, 21 nt, synthetic construct
  source 1..21: mol_type = other RNA
ggggtgtccgtgtggaaaact

SEQ ID NO: 17627 - RNA, 21 nt, synthetic construct
  source 1..21: mol_type = other RNA
ggggttcagagaggagggatt

SEQ ID NO: 17628 - RNA, 21 nt, synthetic construct
  source 1..21: mol_type = other RNA
ggggttcccgcacccagatga

SEQ ID NO: 17629 - RNA, 21 nt, synthetic construct
  source 1..21: mol_type = other RNA
ggggttcctggctctgctctt

SEQ ID NO: 17630 - RNA, 21 nt, synthetic construct
  source 1..21: mol_type = other RNA
ggggttgggcctggactctgg

SEQ ID NO: 17631 - RNA, 21 nt, synthetic construct
  source 1..21: mol_type = other RNA
ggggttgggggctagagtagg

SEQ ID NO: 17632 - RNA, 21 nt, synthetic construct
  source 1..21: mol_type = other RNA
ggggttttgccgtgtctaaca

SEQ ID NO: 17633 - RNA, 21 nt, synthetic construct
  source 1..21: mol_type = other RNA
gggtaatttatcccgtggatc

SEQ ID NO: 17634 - RNA, 21 nt, synthetic construct
  source 1..21: mol_type = other RNA
gggtaccagcctcaccaagtg

SEQ ID NO: 17635 - RNA, 21 nt, synthetic construct
  source 1..21: mol_type = other RNA
gggtaccccacgtgggtttat

SEQ ID NO: 17636 - RNA, 21 nt, synthetic construct
  source 1..21: mol_type = other RNA
gggtaccctaagaacttggga

SEQ ID NO: 17637 - RNA, 21 nt, synthetic construct
  source 1..21: mol_type = other RNA
gggtagcgcagggtggccact

SEQ ID NO: 17638 - RNA, 21 nt, synthetic construct
  source 1..21: mol_type = other RNA
gggtatcccaggaggcctgga

SEQ ID NO: 17639 - RNA, 21 nt, synthetic construct
  source 1..21: mol_type = other RNA
gggtcaagctcggaaaccacc

SEQ ID NO: 17640 - RNA, 21 nt, synthetic construct
  source 1..21: mol_type = other RNA
gggtcaggtctgggtgtgggg

SEQ ID NO: 17641 - RNA, 21 nt, synthetic construct
  source 1..21: mol_type = other RNA
gggtcattttccccactgtcc

SEQ ID NO: 17642 - RNA, 21 nt, synthetic construct
  source 1..21: mol_type = other RNA
gggtccaaaacttggggggac

SEQ ID NO: 17643 - RNA, 21 nt, synthetic construct
  source 1..21: mol_type = other RNA
gggtccaggccaagtaggtgg

SEQ ID NO: 17644 - RNA, 21 nt, synthetic construct
  source 1..21: mol_type = other RNA
gggtccaggcccagccccgcc

SEQ ID NO: 17645 - RNA, 21 nt, synthetic construct
  source 1..21: mol_type = other RNA
gggtcccgcttccctaaggcc

SEQ ID NO: 17646 - RNA, 21 nt, synthetic construct
  source 1..21: mol_type = other RNA
gggtcggaggagggacttgcc

SEQ ID NO: 17647 - RNA, 21 nt, synthetic construct
  source 1..21: mol_type = other RNA
gggtctgaatggggagaggct

SEQ ID NO: 17648 - RNA, 21 nt, synthetic construct
  source 1..21: mol_type = other RNA
gggtctgagggtggagggact

SEQ ID NO: 17649 - RNA, 21 nt, synthetic construct
  source 1..21: mol_type = other RNA
gggtcttagggaggcggggct

SEQ ID NO: 17650 - RNA, 21 nt, synthetic construct
  source 1..21: mol_type = other RNA
gggtgaccagcttatgctgtt

SEQ ID NO: 17651 - RNA, 21 nt, synthetic construct
  source 1..21: mol_type = other RNA
gggtgactcttgattcccggc

SEQ ID NO: 17652 - RNA, 21 nt, synthetic construct
  source 1..21: mol_type = other RNA
gggtgactgcttggcaaactc

SEQ ID NO: 17653 - RNA, 21 nt, synthetic construct
  source 1..21: mol_type = other RNA
gggtgagacagctgcacacct

SEQ ID NO: 17654 - RNA, 21 nt, synthetic construct
  source 1..21: mol_type = other RNA
gggtgcaggaatgggggcagg

SEQ ID NO: 17655 - RNA, 21 nt, synthetic construct
  source 1..21: mol_type = other RNA
gggtgcgggaaccccacatgg

SEQ ID NO: 17656 - RNA, 21 nt, synthetic construct
  source 1..21: mol_type = other RNA
gggtggaaataaacgagccga

SEQ ID NO: 17657 - RNA, 21 nt, synthetic construct
  source 1..21: mol_type = other RNA
gggtggaggaaggccaccctg

SEQ ID NO: 17658 - RNA, 21 nt, synthetic construct
  source 1..21: mol_type = other RNA
gggtggagggactgggggcct

SEQ ID NO: 17659 - RNA, 21 nt, synthetic construct
  source 1..21: mol_type = other RNA
gggtggattctcctccaactg

SEQ ID NO: 17660 - RNA, 21 nt, synthetic construct
  source 1..21: mol_type = other RNA
gggtggccactgagaaccggg

SEQ ID NO: 17661 - RNA, 21 nt, synthetic construct
  source 1..21: mol_type = other RNA
gggtggcctctcgtggggtcc

SEQ ID NO: 17662 - RNA, 21 nt, synthetic construct
  source 1..21: mol_type = other RNA
gggtggccttcctccaccctg

SEQ ID NO: 17663 - RNA, 21 nt, synthetic construct
  source 1..21: mol_type = other RNA
gggtgggctccgggacctgaa

SEQ ID NO: 17664 - RNA, 21 nt, synthetic construct
  source 1..21: mol_type = other RNA
gggtgggctggggttcagaga

SEQ ID NO: 17665 - RNA, 21 nt, synthetic construct
  source 1..21: mol_type = other RNA
gggtggtgacgggggttttgc

SEQ ID NO: 17666 - RNA, 21 nt, synthetic construct
  source 1..21: mol_type = other RNA
gggtggtttccgagcttgacc

SEQ ID NO: 17667 - RNA, 21 nt, synthetic construct
  source 1..21: mol_type = other RNA
gggtgtccgtgtggaaaactc

SEQ ID NO: 17668 - RNA, 21 nt, synthetic construct
  source 1..21: mol_type = other RNA
gggtgtggggtgaccagctta

SEQ ID NO: 17669 - RNA, 21 nt, synthetic construct
  source 1..21: mol_type = other RNA
gggttcagagaggagggattc

SEQ ID NO: 17670 - RNA, 21 nt, synthetic construct
  source 1..21: mol_type = other RNA
gggttcccgcacccagatgag

SEQ ID NO: 17671 - RNA, 21 nt, synthetic construct
  source 1..21: mol_type = other RNA
gggttcctggctctgctcttc

SEQ ID NO: 17672 - RNA, 21 nt, synthetic construct
  source 1..21: mol_type = other RNA
gggttgaatggggaggggttg

SEQ ID NO: 17673 - RNA, 21 nt, synthetic construct
  source 1..21: mol_type = other RNA
gggttgggcctggactctgga

SEQ ID NO: 17674 - RNA, 21 nt, synthetic construct
  source 1..21: mol_type = other RNA
gggttgggggctagagtagga

SEQ ID NO: 17675 - RNA, 21 nt, synthetic construct
  source 1..21: mol_type = other RNA
gggtttaaggcaggaggggct

SEQ ID NO: 17676 - RNA, 21 nt, synthetic construct
  source 1..21: mol_type = other RNA
gggtttatcaaccacttggtg

SEQ ID NO: 17677 - RNA, 21 nt, synthetic construct
  source 1..21: mol_type = other RNA
gggtttcagtgctaaaactag

SEQ ID NO: 17678 - RNA, 21 nt, synthetic construct
  source 1..21: mol_type = other RNA
gggtttgagagaggaggggct

SEQ ID NO: 17679 - RNA, 21 nt, synthetic construct
  source 1..21: mol_type = other RNA
gggtttgagtccttggcaagc

SEQ ID NO: 17680 - RNA, 21 nt, synthetic construct
  source 1..21: mol_type = other RNA
gggtttgggtcaggtctgggt

SEQ ID NO: 17681 - RNA, 21 nt, synthetic construct
  source 1..21: mol_type = other RNA
gggttttgccgtgtctaacag

SEQ ID NO: 17682 - RNA, 21 nt, synthetic construct
  source 1..21: mol_type = other RNA
ggtaaaactgacgcacggagg

SEQ ID NO: 17683 - RNA, 21 nt, synthetic construct
  source 1..21: mol_type = other RNA
ggtaatttatcccgtggatct

SEQ ID NO: 17684 - RNA, 21 nt, synthetic construct
  source 1..21: mol_type = other RNA
ggtaccagcctcaccaagtgg

SEQ ID NO: 17685 - RNA, 21 nt, synthetic construct
  source 1..21: mol_type = other RNA
ggtaccatgtggggttcccgc

SEQ ID NO: 17686 - RNA, 21 nt, synthetic construct
  source 1..21: mol_type = other RNA
ggtaccccacgtgggtttatc

SEQ ID NO: 17687 - RNA, 21 nt, synthetic construct
  source 1..21: mol_type = other RNA
ggtaccctaagaacttgggaa

SEQ ID NO: 17688 - RNA, 21 nt, synthetic construct
  source 1..21: mol_type = other RNA
ggtaccctgcccccattcctg

SEQ ID NO: 17689 - RNA, 21 nt, synthetic construct
  source 1..21: mol_type = other RNA
ggtacctgttagacacggcaa

SEQ ID NO: 17690 - RNA, 21 nt, synthetic construct
  source 1..21: mol_type = other RNA
ggtagacagggctggggtggc

SEQ ID NO: 17691 - RNA, 21 nt, synthetic construct
  source 1..21: mol_type = other RNA
ggtagcgcagggtggccactg

SEQ ID NO: 17692 - RNA, 21 nt, synthetic construct
  source 1..21: mol_type = other RNA
ggtatcccaggaggcctggag

SEQ ID NO: 17693 - RNA, 21 nt, synthetic construct
  source 1..21: mol_type = other RNA
ggtcaagctcggaaaccaccc

SEQ ID NO: 17694 - RNA, 21 nt, synthetic construct
  source 1..21: mol_type = other RNA
ggtcaccccacacccagacct

SEQ ID NO: 17695 - RNA, 21 nt, synthetic construct
  source 1..21: mol_type = other RNA
ggtcactgtctctgggtgact

SEQ ID NO: 17696 - RNA, 21 nt, synthetic construct
  source 1..21: mol_type = other RNA
ggtcaggccggccaggccttc

SEQ ID NO: 17697 - RNA, 21 nt, synthetic construct
  source 1..21: mol_type = other RNA
ggtcaggtctgggtgtggggt

SEQ ID NO: 17698 - RNA, 21 nt, synthetic construct
  source 1..21: mol_type = other RNA
ggtcatggaaactcgggctgt

SEQ ID NO: 17699 - RNA, 21 nt, synthetic construct
  source 1..21: mol_type = other RNA
ggtcattttccccactgtcct

SEQ ID NO: 17700 - RNA, 21 nt, synthetic construct
  source 1..21: mol_type = other RNA
ggtccaaaacttggggggaca

SEQ ID NO: 17701 - RNA, 21 nt, synthetic construct
  source 1..21: mol_type = other RNA
ggtccaggccaagtaggtggc

SEQ ID NO: 17702 - RNA, 21 nt, synthetic construct
  source 1..21: mol_type = other RNA
ggtccaggcccagccccgcct

SEQ ID NO: 17703 - RNA, 21 nt, synthetic construct
  source 1..21: mol_type = other RNA
ggtccccaagcatcgcccccc

SEQ ID NO: 17704 - RNA, 21 nt, synthetic construct
  source 1..21: mol_type = other RNA
ggtcccgcttccctaaggccc

SEQ ID NO: 17705 - RNA, 21 nt, synthetic construct
  source 1..21: mol_type = other RNA
ggtcccggagcccacccagtg

SEQ ID NO: 17706 - RNA, 21 nt, synthetic construct
  source 1..21: mol_type = other RNA
ggtcctgagttctaactttgg

SEQ ID NO: 17707 - RNA, 21 nt, synthetic construct
  source 1..21: mol_type = other RNA
ggtccttccaagggtcaagct

SEQ ID NO: 17708 - RNA, 21 nt, synthetic construct
  source 1..21: mol_type = other RNA
ggtccttgaaagggaaaggcc

SEQ ID NO: 17709 - RNA, 21 nt, synthetic construct
  source 1..21: mol_type = other RNA
ggtcggaggagggacttgccc

SEQ ID NO: 17710 - RNA, 21 nt, synthetic construct
  source 1..21: mol_type = other RNA
ggtcgtggccgcctctactcc

SEQ ID NO: 17711 - RNA, 21 nt, synthetic construct
  source 1..21: mol_type = other RNA
ggtctgaatggggagaggctg

SEQ ID NO: 17712 - RNA, 21 nt, synthetic construct
  source 1..21: mol_type = other RNA
ggtctgagggtggagggactg

SEQ ID NO: 17713 - RNA, 21 nt, synthetic construct
  source 1..21: mol_type = other RNA
ggtctgggtgtggggtgacca

SEQ ID NO: 17714 - RNA, 21 nt, synthetic construct
  source 1..21: mol_type = other RNA
ggtcttagggaggcggggctg

SEQ ID NO: 17715 - RNA, 21 nt, synthetic construct
  source 1..21: mol_type = other RNA
ggtgaacacctaggacgcacc

SEQ ID NO: 17716 - RNA, 21 nt, synthetic construct
  source 1..21: mol_type = other RNA
ggtgaagagccaaagttagaa

SEQ ID NO: 17717 - RNA, 21 nt, synthetic construct
  source 1..21: mol_type = other RNA
ggtgaccagcttatgctgttt

SEQ ID NO: 17718 - RNA, 21 nt, synthetic construct
  source 1..21: mol_type = other RNA
ggtgacgggggttttgccgtg

SEQ ID NO: 17719 - RNA, 21 nt, synthetic construct
  source 1..21: mol_type = other RNA
ggtgactcttgattcccggcc

SEQ ID NO: 17720 - RNA, 21 nt, synthetic construct
  source 1..21: mol_type = other RNA
ggtgactgcttggcaaactca

SEQ ID NO: 17721 - RNA, 21 nt, synthetic construct
  source 1..21: mol_type = other RNA
ggtgagacagctgcacacctg

SEQ ID NO: 17722 - RNA, 21 nt, synthetic construct
  source 1..21: mol_type = other RNA
ggtgaggaggggggtgtccgt

SEQ ID NO: 17723 - RNA, 21 nt, synthetic construct
  source 1..21: mol_type = other RNA
ggtgaggctggtaccctgccc

SEQ ID NO: 17724 - RNA, 21 nt, synthetic construct
  source 1..21: mol_type = other RNA
ggtgagggacttggggggtaa

SEQ ID NO: 17725 - RNA, 21 nt, synthetic construct
  source 1..21: mol_type = other RNA
ggtgcaggaatgggggcaggg

SEQ ID NO: 17726 - RNA, 21 nt, synthetic construct
  source 1..21: mol_type = other RNA
ggtgcccaggcctcaggcatc

SEQ ID NO: 17727 - RNA, 21 nt, synthetic construct
  source 1..21: mol_type = other RNA
ggtgcgggaaccccacatggt

SEQ ID NO: 17728 - RNA, 21 nt, synthetic construct
  source 1..21: mol_type = other RNA
ggtgcgtcctaggtgttcacc

SEQ ID NO: 17729 - RNA, 21 nt, synthetic construct
  source 1..21: mol_type = other RNA
ggtgcgtttcactgatcctgg

SEQ ID NO: 17730 - RNA, 21 nt, synthetic construct
  source 1..21: mol_type = other RNA
ggtgctaggacagtggggaaa

SEQ ID NO: 17731 - RNA, 21 nt, synthetic construct
  source 1..21: mol_type = other RNA
ggtgctgcagcttccttacac

SEQ ID NO: 17732 - RNA, 21 nt, synthetic construct
  source 1..21: mol_type = other RNA
ggtggaaataaacgagccgag

SEQ ID NO: 17733 - RNA, 21 nt, synthetic construct
  source 1..21: mol_type = other RNA
ggtggacgaggaagggggaca

SEQ ID NO: 17734 - RNA, 21 nt, synthetic construct
  source 1..21: mol_type = other RNA
ggtggagaaactggccgggaa

SEQ ID NO: 17735 - RNA, 21 nt, synthetic construct
  source 1..21: mol_type = other RNA
ggtggaggaaggccaccctgt

SEQ ID NO: 17736 - RNA, 21 nt, synthetic construct
  source 1..21: mol_type = other RNA
ggtggagggactgggggcctg

SEQ ID NO: 17737 - RNA, 21 nt, synthetic construct
  source 1..21: mol_type = other RNA
ggtggattctcctccaactgt

SEQ ID NO: 17738 - RNA, 21 nt, synthetic construct
  source 1..21: mol_type = other RNA
ggtggccactgagaaccgggc

SEQ ID NO: 17739 - RNA, 21 nt, synthetic construct
  source 1..21: mol_type = other RNA
ggtggcccgtgtcagcccctg

SEQ ID NO: 17740 - RNA, 21 nt, synthetic construct
  source 1..21: mol_type = other RNA
ggtggcctctcgtggggtcca

SEQ ID NO: 17741 - RNA, 21 nt, synthetic construct
  source 1..21: mol_type = other RNA
ggtggcctggggcctctgggg

SEQ ID NO: 17742 - RNA, 21 nt, synthetic construct
  source 1..21: mol_type = other RNA
ggtggccttcctccaccctgc

SEQ ID NO: 17743 - RNA, 21 nt, synthetic construct
  source 1..21: mol_type = other RNA
ggtggcgcttccagtgctcag

SEQ ID NO: 17744 - RNA, 21 nt, synthetic construct
  source 1..21: mol_type = other RNA
ggtgggctccgggacctgaac

SEQ ID NO: 17745 - RNA, 21 nt, synthetic construct
  source 1..21: mol_type = other RNA
ggtgggctggggttcagagag

SEQ ID NO: 17746 - RNA, 21 nt, synthetic construct
  source 1..21: mol_type = other RNA
ggtggtgacgggggttttgcc

SEQ ID NO: 17747 - RNA, 21 nt, synthetic construct
  source 1..21: mol_type = other RNA
ggtggtttccgagcttgaccc

SEQ ID NO: 17748 - RNA, 21 nt, synthetic construct
  source 1..21: mol_type = other RNA
ggtgtcccagcaagtcgggac

SEQ ID NO: 17749 - RNA, 21 nt, synthetic construct
  source 1..21: mol_type = other RNA
ggtgtccgtgtggaaaactcc

SEQ ID NO: 17750 - RNA, 21 nt, synthetic construct
  source 1..21: mol_type = other RNA
ggtgtgcagctgtctcacccc

SEQ ID NO: 17751 - RNA, 21 nt, synthetic construct
  source 1..21: mol_type = other RNA
ggtgtggggtgaccagcttat

SEQ ID NO: 17752 - RNA, 21 nt, synthetic construct
  source 1..21: mol_type = other RNA
ggtgttcaccaggtcgtggcc

SEQ ID NO: 17753 - RNA, 21 nt, synthetic construct
  source 1..21: mol_type = other RNA
ggttacgtggccaagaagcag

SEQ ID NO: 17754 - RNA, 21 nt, synthetic construct
  source 1..21: mol_type = other RNA
ggttcagagaggagggattcc

SEQ ID NO: 17755 - RNA, 21 nt, synthetic construct
  source 1..21: mol_type = other RNA
ggttccagcccctcctccttc

SEQ ID NO: 17756 - RNA, 21 nt, synthetic construct
  source 1..21: mol_type = other RNA
ggttcccgcacccagatgaga

SEQ ID NO: 17757 - RNA, 21 nt, synthetic construct
  source 1..21: mol_type = other RNA
ggttcctggctctgctcttca

SEQ ID NO: 17758 - RNA, 21 nt, synthetic construct
  source 1..21: mol_type = other RNA
ggttctcagtggccaccctgc

SEQ ID NO: 17759 - RNA, 21 nt, synthetic construct
  source 1..21: mol_type = other RNA
ggttctgggagagggtagcgc

SEQ ID NO: 17760 - RNA, 21 nt, synthetic construct
  source 1..21: mol_type = other RNA
ggttgaatggggaggggttgg

SEQ ID NO: 17761 - RNA, 21 nt, synthetic construct
  source 1..21: mol_type = other RNA
ggttgataaacccacgtgggg

SEQ ID NO: 17762 - RNA, 21 nt, synthetic construct
  source 1..21: mol_type = other RNA
ggttgcccagtggtcaggccg

SEQ ID NO: 17763 - RNA, 21 nt, synthetic construct
  source 1..21: mol_type = other RNA
ggttgggcctggactctggag

SEQ ID NO: 17764 - RNA, 21 nt, synthetic construct
  source 1..21: mol_type = other RNA
ggttgggggctagagtaggag

SEQ ID NO: 17765 - RNA, 21 nt, synthetic construct
  source 1..21: mol_type = other RNA
ggttggtcactgtctctgggt

SEQ ID NO: 17766 - RNA, 21 nt, synthetic construct
  source 1..21: mol_type = other RNA
ggtttaaggcaggaggggctg

SEQ ID NO: 17767 - RNA, 21 nt, synthetic construct
  source 1..21: mol_type = other RNA
ggtttatcaaccacttggtga

SEQ ID NO: 17768 - RNA, 21 nt, synthetic construct
  source 1..21: mol_type = other RNA
ggtttcagtgctaaaactagg

SEQ ID NO: 17769 - RNA, 21 nt, synthetic construct
  source 1..21: mol_type = other RNA
ggtttccactgagcactgaag

SEQ ID NO: 17770 - RNA, 21 nt, synthetic construct
  source 1..21: mol_type = other RNA
ggtttccgagcttgacccttg

SEQ ID NO: 17771 - RNA, 21 nt, synthetic construct
  source 1..21: mol_type = other RNA
ggtttgagagaggaggggctg

SEQ ID NO: 17772 - RNA, 21 nt, synthetic construct
  source 1..21: mol_type = other RNA
ggtttgagtccttggcaagcc

SEQ ID NO: 17773 - RNA, 21 nt, synthetic construct
  source 1..21: mol_type = other RNA
ggtttgggtcaggtctgggtg

SEQ ID NO: 17774 - RNA, 21 nt, synthetic construct
  source 1..21: mol_type = other RNA
ggttttgccgtgtctaacagg

SEQ ID NO: 17775 - RNA, 21 nt, synthetic construct
  source 1..21: mol_type = other RNA
gtaaaactgacgcacggagga

SEQ ID NO: 17776 - RNA, 21 nt, synthetic construct
  source 1..21: mol_type = other RNA
gtaacctgagaagggaatccc

SEQ ID NO: 17777 - RNA, 21 nt, synthetic construct
  source 1..21: mol_type = other RNA
gtaaggaagctgcagcaccag

SEQ ID NO: 17778 - RNA, 21 nt, synthetic construct
  source 1..21: mol_type = other RNA
gtaatttatcccgtggatcta

SEQ ID NO: 17779 - RNA, 21 nt, synthetic construct
  source 1..21: mol_type = other RNA
gtacaggcatccctgtgaaag

SEQ ID NO: 17780 - RNA, 21 nt, synthetic construct
  source 1..21: mol_type = other RNA
gtaccagcctcaccaagtggt

SEQ ID NO: 17781 - RNA, 21 nt, synthetic construct
  source 1..21: mol_type = other RNA
gtaccatgtggggttcccgca

SEQ ID NO: 17782 - RNA, 21 nt, synthetic construct
  source 1..21: mol_type = other RNA
gtaccccacgtgggtttatca

SEQ ID NO: 17783 - RNA, 21 nt, synthetic construct
  source 1..21: mol_type = other RNA
gtaccctaagaacttgggaac

SEQ ID NO: 17784 - RNA, 21 nt, synthetic construct
  source 1..21: mol_type = other RNA
gtaccctgcccccattcctgc

SEQ ID NO: 17785 - RNA, 21 nt, synthetic construct
  source 1..21: mol_type = other RNA
gtacctgttagacacggcaaa

SEQ ID NO: 17786 - RNA, 21 nt, synthetic construct
  source 1..21: mol_type = other RNA
gtactgggcaggtccttgaaa

SEQ ID NO: 17787 - RNA, 21 nt, synthetic construct
  source 1..21: mol_type = other RNA
gtagacagggctggggtggcc

SEQ ID NO: 17788 - RNA, 21 nt, synthetic construct
  source 1..21: mol_type = other RNA
gtagaggcggccacgacctgg

SEQ ID NO: 17789 - RNA, 21 nt, synthetic construct
  source 1..21: mol_type = other RNA
gtagccagccccgtcctggca

SEQ ID NO: 17790 - RNA, 21 nt, synthetic construct
  source 1..21: mol_type = other RNA
gtagcgcagggtggccactga

SEQ ID NO: 17791 - RNA, 21 nt, synthetic construct
  source 1..21: mol_type = other RNA
gtagctccctcccgcctcctc

SEQ ID NO: 17792 - RNA, 21 nt, synthetic construct
  source 1..21: mol_type = other RNA
gtaggaggggctggagccagg

SEQ ID NO: 17793 - RNA, 21 nt, synthetic construct
  source 1..21: mol_type = other RNA
gtagggaaggggcaggagagc

SEQ ID NO: 17794 - RNA, 21 nt, synthetic construct
  source 1..21: mol_type = other RNA
gtaggtggcctggggcctctg

SEQ ID NO: 17795 - RNA, 21 nt, synthetic construct
  source 1..21: mol_type = other RNA
gtatcccaggaggcctggagc

SEQ ID NO: 17796 - RNA, 21 nt, synthetic construct
  source 1..21: mol_type = other RNA
gtatctgctggggtggtttcc

SEQ ID NO: 17797 - RNA, 21 nt, synthetic construct
  source 1..21: mol_type = other RNA
gtatcttaaacagccagtggc

SEQ ID NO: 17798 - RNA, 21 nt, synthetic construct
  source 1..21: mol_type = other RNA
gtcaagctcggaaaccacccc

SEQ ID NO: 17799 - RNA, 21 nt, synthetic construct
  source 1..21: mol_type = other RNA
gtcacactccagttcactgag

SEQ ID NO: 17800 - RNA, 21 nt, synthetic construct
  source 1..21: mol_type = other RNA
gtcaccacccacaggtggcgc

SEQ ID NO: 17801 - RNA, 21 nt, synthetic construct
  source 1..21: mol_type = other RNA
gtcacccagagacagtgacca

SEQ ID NO: 17802 - RNA, 21 nt, synthetic construct
  source 1..21: mol_type = other RNA
gtcaccccacacccagacctg

SEQ ID NO: 17803 - RNA, 21 nt, synthetic construct
  source 1..21: mol_type = other RNA
gtcaccccacagttggaggag

SEQ ID NO: 17804 - RNA, 21 nt, synthetic construct
  source 1..21: mol_type = other RNA
gtcactgtctctgggtgactc

SEQ ID NO: 17805 - RNA, 21 nt, synthetic construct
  source 1..21: mol_type = other RNA
gtcagagcagctcaggttctg

SEQ ID NO: 17806 - RNA, 21 nt, synthetic construct
  source 1..21: mol_type = other RNA
gtcagcccctggctgcagggc

SEQ ID NO: 17807 - RNA, 21 nt, synthetic construct
  source 1..21: mol_type = other RNA
gtcaggccggccaggccttca

SEQ ID NO: 17808 - RNA, 21 nt, synthetic construct
  source 1..21: mol_type = other RNA
gtcaggtctgggtgtggggtg

SEQ ID NO: 17809 - RNA, 21 nt, synthetic construct
  source 1..21: mol_type = other RNA
gtcagttttacctgtgagata

SEQ ID NO: 17810 - RNA, 21 nt, synthetic construct
  source 1..21: mol_type = other RNA
gtcatggaaactcgggctgtg

SEQ ID NO: 17811 - RNA, 21 nt, synthetic construct
  source 1..21: mol_type = other RNA
gtcatggcgataggggagggg

SEQ ID NO: 17812 - RNA, 21 nt, synthetic construct
  source 1..21: mol_type = other RNA
gtcattttccccactgtccta

SEQ ID NO: 17813 - RNA, 21 nt, synthetic construct
  source 1..21: mol_type = other RNA
gtccaaaacttggggggacaa

SEQ ID NO: 17814 - RNA, 21 nt, synthetic construct
  source 1..21: mol_type = other RNA
gtccacaaggcctggggcaag

SEQ ID NO: 17815 - RNA, 21 nt, synthetic construct
  source 1..21: mol_type = other RNA
gtccaccatctcatgcccctg

SEQ ID NO: 17816 - RNA, 21 nt, synthetic construct
  source 1..21: mol_type = other RNA
gtccaggccaagtaggtggcc

SEQ ID NO: 17817 - RNA, 21 nt, synthetic construct
  source 1..21: mol_type = other RNA
gtccaggcccaacccctcccc

SEQ ID NO: 17818 - RNA, 21 nt, synthetic construct
  source 1..21: mol_type = other RNA
gtccaggcccagccccgcctc

SEQ ID NO: 17819 - RNA, 21 nt, synthetic construct
  source 1..21: mol_type = other RNA
gtccaggccccagcccctcct

SEQ ID NO: 17820 - RNA, 21 nt, synthetic construct
  source 1..21: mol_type = other RNA
gtccaggcccccagcctctcc

SEQ ID NO: 17821 - RNA, 21 nt, synthetic construct
  source 1..21: mol_type = other RNA
gtccaggcccccagtccctcc

SEQ ID NO: 17822 - RNA, 21 nt, synthetic construct
  source 1..21: mol_type = other RNA
gtccagggggtcggaggaggg

SEQ ID NO: 17823 - RNA, 21 nt, synthetic construct
  source 1..21: mol_type = other RNA
gtcccagatagcactggggac

SEQ ID NO: 17824 - RNA, 21 nt, synthetic construct
  source 1..21: mol_type = other RNA
gtcccagcaagtcgggactcc

SEQ ID NO: 17825 - RNA, 21 nt, synthetic construct
  source 1..21: mol_type = other RNA
gtcccagcacagggtggcctt

SEQ ID NO: 17826 - RNA, 21 nt, synthetic construct
  source 1..21: mol_type = other RNA
gtccccaagcatcgcccccct

SEQ ID NO: 17827 - RNA, 21 nt, synthetic construct
  source 1..21: mol_type = other RNA
gtccccaatttatattgttcc

SEQ ID NO: 17828 - RNA, 21 nt, synthetic construct
  source 1..21: mol_type = other RNA
gtccccagtgctatctgggac

SEQ ID NO: 17829 - RNA, 21 nt, synthetic construct
  source 1..21: mol_type = other RNA
gtccccccaagttttggaccc

SEQ ID NO: 17830 - RNA, 21 nt, synthetic construct
  source 1..21: mol_type = other RNA
gtcccccttcctcgtccacca

SEQ ID NO: 17831 - RNA, 21 nt, synthetic construct
  source 1..21: mol_type = other RNA
gtcccgcccaggcccctgagt

SEQ ID NO: 17832 - RNA, 21 nt, synthetic construct
  source 1..21: mol_type = other RNA
gtcccgcttccctaaggccct

SEQ ID NO: 17833 - RNA, 21 nt, synthetic construct
  source 1..21: mol_type = other RNA
gtcccggagcccacccagtgt

SEQ ID NO: 17834 - RNA, 21 nt, synthetic construct
  source 1..21: mol_type = other RNA
gtccctcacctctccaaagct

SEQ ID NO: 17835 - RNA, 21 nt, synthetic construct
  source 1..21: mol_type = other RNA
gtccctccaccctcagaccca

SEQ ID NO: 17836 - RNA, 21 nt, synthetic construct
  source 1..21: mol_type = other RNA
gtccctcctccgaccccctgg

SEQ ID NO: 17837 - RNA, 21 nt, synthetic construct
  source 1..21: mol_type = other RNA
gtccctggatctgttttcgtg

SEQ ID NO: 17838 - RNA, 21 nt, synthetic construct
  source 1..21: mol_type = other RNA
gtccctggtgcccaggcctca

SEQ ID NO: 17839 - RNA, 21 nt, synthetic construct
  source 1..21: mol_type = other RNA
gtccgtgtggaaaactccctt

SEQ ID NO: 17840 - RNA, 21 nt, synthetic construct
  source 1..21: mol_type = other RNA
gtcctagcaccgtgtccctgg

SEQ ID NO: 17841 - RNA, 21 nt, synthetic construct
  source 1..21: mol_type = other RNA
gtcctaggaaaacagggatgg

SEQ ID NO: 17842 - RNA, 21 nt, synthetic construct
  source 1..21: mol_type = other RNA
gtcctaggtgttcaccaggtc

SEQ ID NO: 17843 - RNA, 21 nt, synthetic construct
  source 1..21: mol_type = other RNA
gtcctgagttctaactttggc

SEQ ID NO: 17844 - RNA, 21 nt, synthetic construct
  source 1..21: mol_type = other RNA
gtcctgcatccttctccaggc

SEQ ID NO: 17845 - RNA, 21 nt, synthetic construct
  source 1..21: mol_type = other RNA
gtcctggcagggctgtggtga

SEQ ID NO: 17846 - RNA, 21 nt, synthetic construct
  source 1..21: mol_type = other RNA
gtcctggcccccagcccctcc

SEQ ID NO: 17847 - RNA, 21 nt, synthetic construct
  source 1..21: mol_type = other RNA
gtcctgggcaaacagcataag

SEQ ID NO: 17848 - RNA, 21 nt, synthetic construct
  source 1..21: mol_type = other RNA
gtccttccaagggtcaagctc

SEQ ID NO: 17849 - RNA, 21 nt, synthetic construct
  source 1..21: mol_type = other RNA
gtccttgaaagggaaaggccc

SEQ ID NO: 17850 - RNA, 21 nt, synthetic construct
  source 1..21: mol_type = other RNA
gtccttggcaagcccaggaga

SEQ ID NO: 17851 - RNA, 21 nt, synthetic construct
  source 1..21: mol_type = other RNA
gtcctttcgtggtttccactg

SEQ ID NO: 17852 - RNA, 21 nt, synthetic construct
  source 1..21: mol_type = other RNA
gtcggaggagggacttgcccc

SEQ ID NO: 17853 - RNA, 21 nt, synthetic construct
  source 1..21: mol_type = other RNA
gtcgggactccagagggagcc

SEQ ID NO: 17854 - RNA, 21 nt, synthetic construct
  source 1..21: mol_type = other RNA
gtcgtggccgcctctactccc

SEQ ID NO: 17855 - RNA, 21 nt, synthetic construct
  source 1..21: mol_type = other RNA
gtctaacaggtaccatgtggg

SEQ ID NO: 17856 - RNA, 21 nt, synthetic construct
  source 1..21: mol_type = other RNA
gtctaccaggctgccttttgg

SEQ ID NO: 17857 - RNA, 21 nt, synthetic construct
  source 1..21: mol_type = other RNA
gtctcacccctctgggagtcc

SEQ ID NO: 17858 - RNA, 21 nt, synthetic construct
  source 1..21: mol_type = other RNA
gtctctgggtgactcttgatt

SEQ ID NO: 17859 - RNA, 21 nt, synthetic construct
  source 1..21: mol_type = other RNA
gtctgaagagcagagccagga

SEQ ID NO: 17860 - RNA, 21 nt, synthetic construct
  source 1..21: mol_type = other RNA
gtctgaatggggagaggctgg

SEQ ID NO: 17861 - RNA, 21 nt, synthetic construct
  source 1..21: mol_type = other RNA
gtctgagcactggaagcgcca

SEQ ID NO: 17862 - RNA, 21 nt, synthetic construct
  source 1..21: mol_type = other RNA
gtctgagggtggagggactgg

SEQ ID NO: 17863 - RNA, 21 nt, synthetic construct
  source 1..21: mol_type = other RNA
gtctgggtgtggggtgaccag

SEQ ID NO: 17864 - RNA, 21 nt, synthetic construct
  source 1..21: mol_type = other RNA
gtctggtgcgtttcactgatc

SEQ ID NO: 17865 - RNA, 21 nt, synthetic construct
  source 1..21: mol_type = other RNA
gtctgtcccagcacagggtgg

SEQ ID NO: 17866 - RNA, 21 nt, synthetic construct
  source 1..21: mol_type = other RNA
gtcttagggaggcggggctgg

SEQ ID NO: 17867 - RNA, 21 nt, synthetic construct
  source 1..21: mol_type = other RNA
gtgaaacgcaccagacggccg

SEQ ID NO: 17868 - RNA, 21 nt, synthetic construct
  source 1..21: mol_type = other RNA
gtgaaagatgcctgaggcctg

SEQ ID NO: 17869 - RNA, 21 nt, synthetic construct
  source 1..21: mol_type = other RNA
gtgaacacctaggacgcacca

SEQ ID NO: 17870 - RNA, 21 nt, synthetic construct
  source 1..21: mol_type = other RNA
gtgaacggggaagggaggggg

SEQ ID NO: 17871 - RNA, 21 nt, synthetic construct
  source 1..21: mol_type = other RNA
gtgaactggagtgtgacagcc

SEQ ID NO: 17872 - RNA, 21 nt, synthetic construct
  source 1..21: mol_type = other RNA
gtgaagagccaaagttagaac

SEQ ID NO: 17873 - RNA, 21 nt, synthetic construct
  source 1..21: mol_type = other RNA
gtgaagctaaactcctagatc

SEQ ID NO: 17874 - RNA, 21 nt, synthetic construct
  source 1..21: mol_type = other RNA
gtgaaggggccgcacgtgccc

SEQ ID NO: 17875 - RNA, 21 nt, synthetic construct
  source 1..21: mol_type = other RNA
gtgacagcctggggcccaggc

SEQ ID NO: 17876 - RNA, 21 nt, synthetic construct
  source 1..21: mol_type = other RNA
gtgaccaaccatccctgtttt

SEQ ID NO: 17877 - RNA, 21 nt, synthetic construct
  source 1..21: mol_type = other RNA
gtgaccagcttatgctgtttg

SEQ ID NO: 17878 - RNA, 21 nt, synthetic construct
  source 1..21: mol_type = other RNA
gtgacctgcccggttctcagt

SEQ ID NO: 17879 - RNA, 21 nt, synthetic construct
  source 1..21: mol_type = other RNA
gtgacgggggttttgccgtgt

SEQ ID NO: 17880 - RNA, 21 nt, synthetic construct
  source 1..21: mol_type = other RNA
gtgactcttgattcccggcca

SEQ ID NO: 17881 - RNA, 21 nt, synthetic construct
  source 1..21: mol_type = other RNA
gtgactgcttggcaaactcac

SEQ ID NO: 17882 - RNA, 21 nt, synthetic construct
  source 1..21: mol_type = other RNA
gtgagaatggtgcgtcctagg

SEQ ID NO: 17883 - RNA, 21 nt, synthetic construct
  source 1..21: mol_type = other RNA
gtgagacagctgcacacctgt

SEQ ID NO: 17884 - RNA, 21 nt, synthetic construct
  source 1..21: mol_type = other RNA
gtgagataaggccagtagcca

SEQ ID NO: 17885 - RNA, 21 nt, synthetic construct
  source 1..21: mol_type = other RNA
gtgaggaggggggtgtccgtg

SEQ ID NO: 17886 - RNA, 21 nt, synthetic construct
  source 1..21: mol_type = other RNA
gtgaggctggtaccctgcccc

SEQ ID NO: 17887 - RNA, 21 nt, synthetic construct
  source 1..21: mol_type = other RNA
gtgagggacttggggggtaat

SEQ ID NO: 17888 - RNA, 21 nt, synthetic construct
  source 1..21: mol_type = other RNA
gtgagtttgccaagcagtcac

SEQ ID NO: 17889 - RNA, 21 nt, synthetic construct
  source 1..21: mol_type = other RNA
gtgcagagggggcctcagtga

SEQ ID NO: 17890 - RNA, 21 nt, synthetic construct
  source 1..21: mol_type = other RNA
gtgcagctgtctcacccctct

SEQ ID NO: 17891 - RNA, 21 nt, synthetic construct
  source 1..21: mol_type = other RNA
gtgcaggaatgggggcagggt

SEQ ID NO: 17892 - RNA, 21 nt, synthetic construct
  source 1..21: mol_type = other RNA
gtgcccaggcctcaggcatct

SEQ ID NO: 17893 - RNA, 21 nt, synthetic construct
  source 1..21: mol_type = other RNA
gtgccctgggaacgggatgaa

SEQ ID NO: 17894 - RNA, 21 nt, synthetic construct
  source 1..21: mol_type = other RNA
gtgcctgggccccaggctgtc

SEQ ID NO: 17895 - RNA, 21 nt, synthetic construct
  source 1..21: mol_type = other RNA
gtgcggccccttcacagcccg

SEQ ID NO: 17896 - RNA, 21 nt, synthetic construct
  source 1..21: mol_type = other RNA
gtgcgggaaccccacatggta

SEQ ID NO: 17897 - RNA, 21 nt, synthetic construct
  source 1..21: mol_type = other RNA
gtgcgtcagttttacctgtga

SEQ ID NO: 17898 - RNA, 21 nt, synthetic construct
  source 1..21: mol_type = other RNA
gtgcgtcctaggtgttcacca

SEQ ID NO: 17899 - RNA, 21 nt, synthetic construct
  source 1..21: mol_type = other RNA
gtgcgtttcactgatcctggt

SEQ ID NO: 17900 - RNA, 21 nt, synthetic construct
  source 1..21: mol_type = other RNA
gtgctaaaactaggctgtcct

SEQ ID NO: 17901 - RNA, 21 nt, synthetic construct
  source 1..21: mol_type = other RNA
gtgctaggacagtggggaaaa

SEQ ID NO: 17902 - RNA, 21 nt, synthetic construct
  source 1..21: mol_type = other RNA
gtgctatctgggacatattcc

SEQ ID NO: 17903 - RNA, 21 nt, synthetic construct
  source 1..21: mol_type = other RNA
gtgctcagactagggaagagg

SEQ ID NO: 17904 - RNA, 21 nt, synthetic construct
  source 1..21: mol_type = other RNA
gtgctcagtggaaaccacgaa

SEQ ID NO: 17905 - RNA, 21 nt, synthetic construct
  source 1..21: mol_type = other RNA
gtgctgcagcttccttacact

SEQ ID NO: 17906 - RNA, 21 nt, synthetic construct
  source 1..21: mol_type = other RNA
gtgctgggacagactcagggg

SEQ ID NO: 17907 - RNA, 21 nt, synthetic construct
  source 1..21: mol_type = other RNA
gtggaaaactccctttgtgag

SEQ ID NO: 17908 - RNA, 21 nt, synthetic construct
  source 1..21: mol_type = other RNA
gtggaaaccacgaaaggactc

SEQ ID NO: 17909 - RNA, 21 nt, synthetic construct
  source 1..21: mol_type = other RNA
gtggaaataaacgagccgagt

SEQ ID NO: 17910 - RNA, 21 nt, synthetic construct
  source 1..21: mol_type = other RNA
gtggacactgggtgggctccg

SEQ ID NO: 17911 - RNA, 21 nt, synthetic construct
  source 1..21: mol_type = other RNA
gtggacgaggaagggggacag

SEQ ID NO: 17912 - RNA, 21 nt, synthetic construct
  source 1..21: mol_type = other RNA
gtggagaaactggccgggaat

SEQ ID NO: 17913 - RNA, 21 nt, synthetic construct
  source 1..21: mol_type = other RNA
gtggaggaaggccaccctgtg

SEQ ID NO: 17914 - RNA, 21 nt, synthetic construct
  source 1..21: mol_type = other RNA
gtggagggactgggggcctgg

SEQ ID NO: 17915 - RNA, 21 nt, synthetic construct
  source 1..21: mol_type = other RNA
gtggatctaggagtttagctt

SEQ ID NO: 17916 - RNA, 21 nt, synthetic construct
  source 1..21: mol_type = other RNA
gtggattctcctccaactgtg

SEQ ID NO: 17917 - RNA, 21 nt, synthetic construct
  source 1..21: mol_type = other RNA
gtggccaagaagcaggggagc

SEQ ID NO: 17918 - RNA, 21 nt, synthetic construct
  source 1..21: mol_type = other RNA
gtggccaccctgcgctaccct

SEQ ID NO: 17919 - RNA, 21 nt, synthetic construct
  source 1..21: mol_type = other RNA
gtggccactgagaaccgggca

SEQ ID NO: 17920 - RNA, 21 nt, synthetic construct
  source 1..21: mol_type = other RNA
gtggccagaggctgttgggtc

SEQ ID NO: 17921 - RNA, 21 nt, synthetic construct
  source 1..21: mol_type = other RNA
gtggcccgtgtcagcccctgg

SEQ ID NO: 17922 - RNA, 21 nt, synthetic construct
  source 1..21: mol_type = other RNA
gtggccgcctctactcccttt

SEQ ID NO: 17923 - RNA, 21 nt, synthetic construct
  source 1..21: mol_type = other RNA
gtggcctctcgtggggtccag

SEQ ID NO: 17924 - RNA, 21 nt, synthetic construct
  source 1..21: mol_type = other RNA
gtggcctggggcctctggggg

SEQ ID NO: 17925 - RNA, 21 nt, synthetic construct
  source 1..21: mol_type = other RNA
gtggccttcctccaccctgca

SEQ ID NO: 17926 - RNA, 21 nt, synthetic construct
  source 1..21: mol_type = other RNA
gtggcgcttccagtgctcaga

SEQ ID NO: 17927 - RNA, 21 nt, synthetic construct
  source 1..21: mol_type = other RNA
gtggctagggggttgggggct

SEQ ID NO: 17928 - RNA, 21 nt, synthetic construct
  source 1..21: mol_type = other RNA
gtggctccctctggagtcccg

SEQ ID NO: 17929 - RNA, 21 nt, synthetic construct
  source 1..21: mol_type = other RNA
gtggctgttcccaagttctta

SEQ ID NO: 17930 - RNA, 21 nt, synthetic construct
  source 1..21: mol_type = other RNA
gtgggcccagggctatgcagg

SEQ ID NO: 17931 - RNA, 21 nt, synthetic construct
  source 1..21: mol_type = other RNA
gtgggctccgggacctgaact

SEQ ID NO: 17932 - RNA, 21 nt, synthetic construct
  source 1..21: mol_type = other RNA
gtgggctggggttcagagagg

SEQ ID NO: 17933 - RNA, 21 nt, synthetic construct
  source 1..21: mol_type = other RNA
gtggggaaaatgacccaacag

SEQ ID NO: 17934 - RNA, 21 nt, synthetic construct
  source 1..21: mol_type = other RNA
gtggggtaccctaagaacttg

SEQ ID NO: 17935 - RNA, 21 nt, synthetic construct
  source 1..21: mol_type = other RNA
gtggggtccaggccaagtagg

SEQ ID NO: 17936 - RNA, 21 nt, synthetic construct
  source 1..21: mol_type = other RNA
gtggggtgaccagcttatgct

SEQ ID NO: 17937 - RNA, 21 nt, synthetic construct
  source 1..21: mol_type = other RNA
gtggggtgactgcttggcaaa

SEQ ID NO: 17938 - RNA, 21 nt, synthetic construct
  source 1..21: mol_type = other RNA
gtggggttcccgcacccagat

SEQ ID NO: 17939 - RNA, 21 nt, synthetic construct
  source 1..21: mol_type = other RNA
gtgggtggtgacgggggtttt

SEQ ID NO: 17940 - RNA, 21 nt, synthetic construct
  source 1..21: mol_type = other RNA
gtgggtttatcaaccacttgg

SEQ ID NO: 17941 - RNA, 21 nt, synthetic construct
  source 1..21: mol_type = other RNA
gtggtcaggccggccaggcct

SEQ ID NO: 17942 - RNA, 21 nt, synthetic construct
  source 1..21: mol_type = other RNA
gtggtgacgggggttttgccg

SEQ ID NO: 17943 - RNA, 21 nt, synthetic construct
  source 1..21: mol_type = other RNA
gtggtgaggaggggggtgtcc

SEQ ID NO: 17944 - RNA, 21 nt, synthetic construct
  source 1..21: mol_type = other RNA
gtggttgataaacccacgtgg

SEQ ID NO: 17945 - RNA, 21 nt, synthetic construct
  source 1..21: mol_type = other RNA
gtggtttccactgagcactga

SEQ ID NO: 17946 - RNA, 21 nt, synthetic construct
  source 1..21: mol_type = other RNA
gtggtttccgagcttgaccct

SEQ ID NO: 17947 - RNA, 21 nt, synthetic construct
  source 1..21: mol_type = other RNA
gtgtaaggaagctgcagcacc

SEQ ID NO: 17948 - RNA, 21 nt, synthetic construct
  source 1..21: mol_type = other RNA
gtgtcagcccctggctgcagg

SEQ ID NO: 17949 - RNA, 21 nt, synthetic construct
  source 1..21: mol_type = other RNA
gtgtccacaaggcctggggca

SEQ ID NO: 17950 - RNA, 21 nt, synthetic construct
  source 1..21: mol_type = other RNA
gtgtcccagcaagtcgggact

SEQ ID NO: 17951 - RNA, 21 nt, synthetic construct
  source 1..21: mol_type = other RNA
gtgtccctggatctgttttcg

SEQ ID NO: 17952 - RNA, 21 nt, synthetic construct
  source 1..21: mol_type = other RNA
gtgtccgtgtggaaaactccc

SEQ ID NO: 17953 - RNA, 21 nt, synthetic construct
  source 1..21: mol_type = other RNA
gtgtctaacaggtaccatgtg

SEQ ID NO: 17954 - RNA, 21 nt, synthetic construct
  source 1..21: mol_type = other RNA
gtgtgacagcctggggcccag

SEQ ID NO: 17955 - RNA, 21 nt, synthetic construct
  source 1..21: mol_type = other RNA
gtgtgcagctgtctcacccct

SEQ ID NO: 17956 - RNA, 21 nt, synthetic construct
  source 1..21: mol_type = other RNA
gtgtgcctgggccccaggctg

SEQ ID NO: 17957 - RNA, 21 nt, synthetic construct
  source 1..21: mol_type = other RNA
gtgtggaaaactccctttgtg

SEQ ID NO: 17958 - RNA, 21 nt, synthetic construct
  source 1..21: mol_type = other RNA
gtgtggggtgaccagcttatg

SEQ ID NO: 17959 - RNA, 21 nt, synthetic construct
  source 1..21: mol_type = other RNA
gtgttcaccaggtcgtggccg

SEQ ID NO: 17960 - RNA, 21 nt, synthetic construct
  source 1..21: mol_type = other RNA
gtgtttctcgtcctgcatcct

SEQ ID NO: 17961 - RNA, 21 nt, synthetic construct
  source 1..21: mol_type = other RNA
gttacgtggccaagaagcagg

SEQ ID NO: 17962 - RNA, 21 nt, synthetic construct
  source 1..21: mol_type = other RNA
gttagaactcaggaccaactt

SEQ ID NO: 17963 - RNA, 21 nt, synthetic construct
  source 1..21: mol_type = other RNA
gttagacacggcaaaaccccc

SEQ ID NO: 17964 - RNA, 21 nt, synthetic construct
  source 1..21: mol_type = other RNA
gttcaccaggtcgtggccgcc

SEQ ID NO: 17965 - RNA, 21 nt, synthetic construct
  source 1..21: mol_type = other RNA
gttcactgaggccccctctgc

SEQ ID NO: 17966 - RNA, 21 nt, synthetic construct
  source 1..21: mol_type = other RNA
gttcacttcctgtttgcagat

SEQ ID NO: 17967 - RNA, 21 nt, synthetic construct
  source 1..21: mol_type = other RNA
gttcagagaggagggattccc

SEQ ID NO: 17968 - RNA, 21 nt, synthetic construct
  source 1..21: mol_type = other RNA
gttcagccctaagaatcctgg

SEQ ID NO: 17969 - RNA, 21 nt, synthetic construct
  source 1..21: mol_type = other RNA
gttcaggtcccggagcccacc

SEQ ID NO: 17970 - RNA, 21 nt, synthetic construct
  source 1..21: mol_type = other RNA
gttcatcccgttcccagggca

SEQ ID NO: 17971 - RNA, 21 nt, synthetic construct
  source 1..21: mol_type = other RNA
gttccagcccctcctccttca

SEQ ID NO: 17972 - RNA, 21 nt, synthetic construct
  source 1..21: mol_type = other RNA
gttcccaagttcttagggtac

SEQ ID NO: 17973 - RNA, 21 nt, synthetic construct
  source 1..21: mol_type = other RNA
gttcccagggcacgtgcggcc

SEQ ID NO: 17974 - RNA, 21 nt, synthetic construct
  source 1..21: mol_type = other RNA
gttcccctgcatcccccttcc

SEQ ID NO: 17975 - RNA, 21 nt, synthetic construct
  source 1..21: mol_type = other RNA
gttcccctgcatccccgttcc

SEQ ID NO: 17976 - RNA, 21 nt, synthetic construct
  source 1..21: mol_type = other RNA
gttcccgcacccagatgagaa

SEQ ID NO: 17977 - RNA, 21 nt, synthetic construct
  source 1..21: mol_type = other RNA
gttcctccgtgcgtcagtttt

SEQ ID NO: 17978 - RNA, 21 nt, synthetic construct
  source 1..21: mol_type = other RNA
gttcctgcagagtatctgctg

SEQ ID NO: 17979 - RNA, 21 nt, synthetic construct
  source 1..21: mol_type = other RNA
gttcctggctctgctcttcag

SEQ ID NO: 17980 - RNA, 21 nt, synthetic construct
  source 1..21: mol_type = other RNA
gttctaactttggctcttcac

SEQ ID NO: 17981 - RNA, 21 nt, synthetic construct
  source 1..21: mol_type = other RNA
gttctcagtggccaccctgcg

SEQ ID NO: 17982 - RNA, 21 nt, synthetic construct
  source 1..21: mol_type = other RNA
gttctgggagagggtagcgca

SEQ ID NO: 17983 - RNA, 21 nt, synthetic construct
  source 1..21: mol_type = other RNA
gttcttagggtaccccacgtg

SEQ ID NO: 17984 - RNA, 21 nt, synthetic construct
  source 1..21: mol_type = other RNA
gttgaatggggaggggttggg

SEQ ID NO: 17985 - RNA, 21 nt, synthetic construct
  source 1..21: mol_type = other RNA
gttgataaacccacgtggggt

SEQ ID NO: 17986 - RNA, 21 nt, synthetic construct
  source 1..21: mol_type = other RNA
gttgcccagtggtcaggccgg

SEQ ID NO: 17987 - RNA, 21 nt, synthetic construct
  source 1..21: mol_type = other RNA
gttggaggagaatccacccaa

SEQ ID NO: 17988 - RNA, 21 nt, synthetic construct
  source 1..21: mol_type = other RNA
gttgggcctggactctggagt

SEQ ID NO: 17989 - RNA, 21 nt, synthetic construct
  source 1..21: mol_type = other RNA
gttgggggctagagtaggagg

SEQ ID NO: 17990 - RNA, 21 nt, synthetic construct
  source 1..21: mol_type = other RNA
gttgggtcattttccccactg

SEQ ID NO: 17991 - RNA, 21 nt, synthetic construct
  source 1..21: mol_type = other RNA
gttggtcactgtctctgggtg

SEQ ID NO: 17992 - RNA, 21 nt, synthetic construct
  source 1..21: mol_type = other RNA
gttggtcctgagttctaactt

SEQ ID NO: 17993 - RNA, 21 nt, synthetic construct
  source 1..21: mol_type = other RNA
gttgtcatggcgataggggag

SEQ ID NO: 17994 - RNA, 21 nt, synthetic construct
  source 1..21: mol_type = other RNA
gtttaagatacgcctggttgc

SEQ ID NO: 17995 - RNA, 21 nt, synthetic construct
  source 1..21: mol_type = other RNA
gtttaaggcaggaggggctgg

SEQ ID NO: 17996 - RNA, 21 nt, synthetic construct
  source 1..21: mol_type = other RNA
gtttagcttcactccttcctc

SEQ ID NO: 17997 - RNA, 21 nt, synthetic construct
  source 1..21: mol_type = other RNA
gtttatcaaccacttggtgag

SEQ ID NO: 17998 - RNA, 21 nt, synthetic construct
  source 1..21: mol_type = other RNA
gtttatttccacccagttgtc

SEQ ID NO: 17999 - RNA, 21 nt, synthetic construct
  source 1..21: mol_type = other RNA
gtttcactgatcctggtgctg

SEQ ID NO: 18000 - RNA, 21 nt, synthetic construct
  source 1..21: mol_type = other RNA
gtttcagtgctaaaactaggc

SEQ ID NO: 18001 - RNA, 21 nt, synthetic construct
  source 1..21: mol_type = other RNA
gtttccactgagcactgaagg

SEQ ID NO: 18002 - RNA, 21 nt, synthetic construct
  source 1..21: mol_type = other RNA
gtttccatgacctcatgctct

SEQ ID NO: 18003 - RNA, 21 nt, synthetic construct
  source 1..21: mol_type = other RNA
gtttccgagcttgacccttgg

SEQ ID NO: 18004 - RNA, 21 nt, synthetic construct
  source 1..21: mol_type = other RNA
gtttctcattcttcccttagg

SEQ ID NO: 18005 - RNA, 21 nt, synthetic construct
  source 1..21: mol_type = other RNA
gtttctccacctggggctgtg

SEQ ID NO: 18006 - RNA, 21 nt, synthetic construct
  source 1..21: mol_type = other RNA
gtttctcgtcctgcatccttc

SEQ ID NO: 18007 - RNA, 21 nt, synthetic construct
  source 1..21: mol_type = other RNA
gtttgagagaggaggggctgg

SEQ ID NO: 18008 - RNA, 21 nt, synthetic construct
  source 1..21: mol_type = other RNA
gtttgagtccttggcaagccc

SEQ ID NO: 18009 - RNA, 21 nt, synthetic construct
  source 1..21: mol_type = other RNA
gtttgcagatagccaggagtc

SEQ ID NO: 18010 - RNA, 21 nt, synthetic construct
  source 1..21: mol_type = other RNA
gtttgccaagcagtcacccca

SEQ ID NO: 18011 - RNA, 21 nt, synthetic construct
  source 1..21: mol_type = other RNA
gtttgcccaggacagcctagt

SEQ ID NO: 18012 - RNA, 21 nt, synthetic construct
  source 1..21: mol_type = other RNA
gtttggaaaaacaaaatcaga

SEQ ID NO: 18013 - RNA, 21 nt, synthetic construct
  source 1..21: mol_type = other RNA
gtttgggtcaggtctgggtgt

SEQ ID NO: 18014 - RNA, 21 nt, synthetic construct
  source 1..21: mol_type = other RNA
gttttacctgtgagataaggc

SEQ ID NO: 18015 - RNA, 21 nt, synthetic construct
  source 1..21: mol_type = other RNA
gttttagcactgaaaccctca

SEQ ID NO: 18016 - RNA, 21 nt, synthetic construct
  source 1..21: mol_type = other RNA
gttttccacacggacaccccc

SEQ ID NO: 18017 - RNA, 21 nt, synthetic construct
  source 1..21: mol_type = other RNA
gttttcctaggactgagggtt

SEQ ID NO: 18018 - RNA, 21 nt, synthetic construct
  source 1..21: mol_type = other RNA
gttttcgtggctccctctgga

SEQ ID NO: 18019 - RNA, 21 nt, synthetic construct
  source 1..21: mol_type = other RNA
gttttgccgtgtctaacaggt

SEQ ID NO: 18020 - RNA, 21 nt, synthetic construct
  source 1..21: mol_type = other RNA
gttttggacccctaagggaag

SEQ ID NO: 18021 - RNA, 21 nt, synthetic construct
  source 1..21: mol_type = other RNA
gtttttccaaactgcttctcc

SEQ ID NO: 18022 - RNA, 21 nt, synthetic construct
  source 1..21: mol_type = other RNA
taaaactaggctgtcctgggc

SEQ ID NO: 18023 - RNA, 21 nt, synthetic construct
  source 1..21: mol_type = other RNA
taaaactgacgcacggaggaa

SEQ ID NO: 18024 - RNA, 21 nt, synthetic construct
  source 1..21: mol_type = other RNA
taaacagccagtggccagagg

SEQ ID NO: 18025 - RNA, 21 nt, synthetic construct
  source 1..21: mol_type = other RNA
taaacccacgtggggtaccct

SEQ ID NO: 18026 - RNA, 21 nt, synthetic construct
  source 1..21: mol_type = other RNA
taaacccagccaggtccttcc

SEQ ID NO: 18027 - RNA, 21 nt, synthetic construct
  source 1..21: mol_type = other RNA
taaacgagccgagttcatccc

SEQ ID NO: 18028 - RNA, 21 nt, synthetic construct
  source 1..21: mol_type = other RNA
taaactcctagatccacggga

SEQ ID NO: 18029 - RNA, 21 nt, synthetic construct
  source 1..21: mol_type = other RNA
taaagagtccccagtgctatc

SEQ ID NO: 18030 - RNA, 21 nt, synthetic construct
  source 1..21: mol_type = other RNA
taaattaccccccaagtccct

SEQ ID NO: 18031 - RNA, 21 nt, synthetic construct
  source 1..21: mol_type = other RNA
taaattggggactagaaaggt

SEQ ID NO: 18032 - RNA, 21 nt, synthetic construct
  source 1..21: mol_type = other RNA
taacaggtaccatgtggggtt

SEQ ID NO: 18033 - RNA, 21 nt, synthetic construct
  source 1..21: mol_type = other RNA
taacctgagaagggaatccct

SEQ ID NO: 18034 - RNA, 21 nt, synthetic construct
  source 1..21: mol_type = other RNA
taactttggctcttcaccttt

SEQ ID NO: 18035 - RNA, 21 nt, synthetic construct
  source 1..21: mol_type = other RNA
taagaacttgggaacagccac

SEQ ID NO: 18036 - RNA, 21 nt, synthetic construct
  source 1..21: mol_type = other RNA
taagaatcctggctccagccc

SEQ ID NO: 18037 - RNA, 21 nt, synthetic construct
  source 1..21: mol_type = other RNA
taagacccagaagtccaggcc

SEQ ID NO: 18038 - RNA, 21 nt, synthetic construct
  source 1..21: mol_type = other RNA
taagatacgcctggttgccca

SEQ ID NO: 18039 - RNA, 21 nt, synthetic construct
  source 1..21: mol_type = other RNA
taagctggtcaccccacaccc

SEQ ID NO: 18040 - RNA, 21 nt, synthetic construct
  source 1..21: mol_type = other RNA
taaggaaagaaggatggagaa

SEQ ID NO: 18041 - RNA, 21 nt, synthetic construct
  source 1..21: mol_type = other RNA
taaggaagctgcagcaccagg

SEQ ID NO: 18042 - RNA, 21 nt, synthetic construct
  source 1..21: mol_type = other RNA
taaggcaattggggtgcagga

SEQ ID NO: 18043 - RNA, 21 nt, synthetic construct
  source 1..21: mol_type = other RNA
taaggcaggaggggctggggg

SEQ ID NO: 18044 - RNA, 21 nt, synthetic construct
  source 1..21: mol_type = other RNA
taaggccagtagccagccccg

SEQ ID NO: 18045 - RNA, 21 nt, synthetic construct
  source 1..21: mol_type = other RNA
taaggccctgctctgggcttc

SEQ ID NO: 18046 - RNA, 21 nt, synthetic construct
  source 1..21: mol_type = other RNA
taagggaagaatgagaaacgg

SEQ ID NO: 18047 - RNA, 21 nt, synthetic construct
  source 1..21: mol_type = other RNA
taagttggtcctgagttctaa

SEQ ID NO: 18048 - RNA, 21 nt, synthetic construct
  source 1..21: mol_type = other RNA
taatttatcccgtggatctag

SEQ ID NO: 18049 - RNA, 21 nt, synthetic construct
  source 1..21: mol_type = other RNA
tacacttcccaagaggagaag

SEQ ID NO: 18050 - RNA, 21 nt, synthetic construct
  source 1..21: mol_type = other RNA
tacaggcatccctgtgaaaga

SEQ ID NO: 18051 - RNA, 21 nt, synthetic construct
  source 1..21: mol_type = other RNA
tacaggggttcctggctctgc

SEQ ID NO: 18052 - RNA, 21 nt, synthetic construct
  source 1..21: mol_type = other RNA
taccagcctcaccaagtggtt

SEQ ID NO: 18053 - RNA, 21 nt, synthetic construct
  source 1..21: mol_type = other RNA
taccaggctgccttttgggtg

SEQ ID NO: 18054 - RNA, 21 nt, synthetic construct
  source 1..21: mol_type = other RNA
taccatgtggggttcccgcac

SEQ ID NO: 18055 - RNA, 21 nt, synthetic construct
  source 1..21: mol_type = other RNA
taccccacgtgggtttatcaa

SEQ ID NO: 18056 - RNA, 21 nt, synthetic construct
  source 1..21: mol_type = other RNA
taccccccaagtccctcacct

SEQ ID NO: 18057 - RNA, 21 nt, synthetic construct
  source 1..21: mol_type = other RNA
taccccgaagagtgagtttgc

SEQ ID NO: 18058 - RNA, 21 nt, synthetic construct
  source 1..21: mol_type = other RNA
taccctaagaacttgggaaca

SEQ ID NO: 18059 - RNA, 21 nt, synthetic construct
  source 1..21: mol_type = other RNA
taccctctcccagaacctgag

SEQ ID NO: 18060 - RNA, 21 nt, synthetic construct
  source 1..21: mol_type = other RNA
taccctgcccccattcctgca

SEQ ID NO: 18061 - RNA, 21 nt, synthetic construct
  source 1..21: mol_type = other RNA
tacctgtgagataaggccagt

SEQ ID NO: 18062 - RNA, 21 nt, synthetic construct
  source 1..21: mol_type = other RNA
tacctgttagacacggcaaaa

SEQ ID NO: 18063 - RNA, 21 nt, synthetic construct
  source 1..21: mol_type = other RNA
tacgagggccaagagcatgag

SEQ ID NO: 18064 - RNA, 21 nt, synthetic construct
  source 1..21: mol_type = other RNA
tacgcctggttgcccagtggt

SEQ ID NO: 18065 - RNA, 21 nt, synthetic construct
  source 1..21: mol_type = other RNA
tacgtggccaagaagcagggg

SEQ ID NO: 18066 - RNA, 21 nt, synthetic construct
  source 1..21: mol_type = other RNA
tactccctttctctttctcca

SEQ ID NO: 18067 - RNA, 21 nt, synthetic construct
  source 1..21: mol_type = other RNA
tactctagcccccaaccccct

SEQ ID NO: 18068 - RNA, 21 nt, synthetic construct
  source 1..21: mol_type = other RNA
tactctgcaggaacgaagccg

SEQ ID NO: 18069 - RNA, 21 nt, synthetic construct
  source 1..21: mol_type = other RNA
tactggccttatctcacaggt

SEQ ID NO: 18070 - RNA, 21 nt, synthetic construct
  source 1..21: mol_type = other RNA
tactgggcaggtccttgaaag

SEQ ID NO: 18071 - RNA, 21 nt, synthetic construct
  source 1..21: mol_type = other RNA
tacttggcctggaccccacga

SEQ ID NO: 18072 - RNA, 21 nt, synthetic construct
  source 1..21: mol_type = other RNA
tagaaaggtgaagagccaaag

SEQ ID NO: 18073 - RNA, 21 nt, synthetic construct
  source 1..21: mol_type = other RNA
tagaactcaggaccaacttat

SEQ ID NO: 18074 - RNA, 21 nt, synthetic construct
  source 1..21: mol_type = other RNA
tagacacggcaaaacccccgt

SEQ ID NO: 18075 - RNA, 21 nt, synthetic construct
  source 1..21: mol_type = other RNA
tagacagggctggggtggcct

SEQ ID NO: 18076 - RNA, 21 nt, synthetic construct
  source 1..21: mol_type = other RNA
tagaggcggccacgacctggt

SEQ ID NO: 18077 - RNA, 21 nt, synthetic construct
  source 1..21: mol_type = other RNA
tagagtaggaggggctggagc

SEQ ID NO: 18078 - RNA, 21 nt, synthetic construct
  source 1..21: mol_type = other RNA
tagatccacgggataaattac

SEQ ID NO: 18079 - RNA, 21 nt, synthetic construct
  source 1..21: mol_type = other RNA
tagcaccgtgtccctggatct

SEQ ID NO: 18080 - RNA, 21 nt, synthetic construct
  source 1..21: mol_type = other RNA
tagcactgaaaccctcagtcc

SEQ ID NO: 18081 - RNA, 21 nt, synthetic construct
  source 1..21: mol_type = other RNA
tagcactggggactctttaag

SEQ ID NO: 18082 - RNA, 21 nt, synthetic construct
  source 1..21: mol_type = other RNA
tagccactaaggcaattgggg

SEQ ID NO: 18083 - RNA, 21 nt, synthetic construct
  source 1..21: mol_type = other RNA
tagccagccccgtcctggcag

SEQ ID NO: 18084 - RNA, 21 nt, synthetic construct
  source 1..21: mol_type = other RNA
tagccaggagtcctttcgtgg

SEQ ID NO: 18085 - RNA, 21 nt, synthetic construct
  source 1..21: mol_type = other RNA
tagcccccaaccccctagcca

SEQ ID NO: 18086 - RNA, 21 nt, synthetic construct
  source 1..21: mol_type = other RNA
tagccctgggcccacggcttc

SEQ ID NO: 18087 - RNA, 21 nt, synthetic construct
  source 1..21: mol_type = other RNA
tagcgcagggtggccactgag

SEQ ID NO: 18088 - RNA, 21 nt, synthetic construct
  source 1..21: mol_type = other RNA
tagctccctcccgcctcctcc

SEQ ID NO: 18089 - RNA, 21 nt, synthetic construct
  source 1..21: mol_type = other RNA
tagcttcactccttcctcagc

SEQ ID NO: 18090 - RNA, 21 nt, synthetic construct
  source 1..21: mol_type = other RNA
taggaaaacagggatggttgg

SEQ ID NO: 18091 - RNA, 21 nt, synthetic construct
  source 1..21: mol_type = other RNA
taggacagtggggaaaatgac

SEQ ID NO: 18092 - RNA, 21 nt, synthetic construct
  source 1..21: mol_type = other RNA
taggacgcaccattctcacaa

SEQ ID NO: 18093 - RNA, 21 nt, synthetic construct
  source 1..21: mol_type = other RNA
taggactgagggtttcagtgc

SEQ ID NO: 18094 - RNA, 21 nt, synthetic construct
  source 1..21: mol_type = other RNA
taggaggggctggagccagga

SEQ ID NO: 18095 - RNA, 21 nt, synthetic construct
  source 1..21: mol_type = other RNA
taggagtttagcttcactcct

SEQ ID NO: 18096 - RNA, 21 nt, synthetic construct
  source 1..21: mol_type = other RNA
taggctgtcctgggcaaacag

SEQ ID NO: 18097 - RNA, 21 nt, synthetic construct
  source 1..21: mol_type = other RNA
tagggaagaggttccagcccc

SEQ ID NO: 18098 - RNA, 21 nt, synthetic construct
  source 1..21: mol_type = other RNA
tagggaagcgggaccctgctc

SEQ ID NO: 18099 - RNA, 21 nt, synthetic construct
  source 1..21: mol_type = other RNA
tagggaaggggcaggagagcc

SEQ ID NO: 18100 - RNA, 21 nt, synthetic construct
  source 1..21: mol_type = other RNA
tagggaggcggggctgggcct

SEQ ID NO: 18101 - RNA, 21 nt, synthetic construct
  source 1..21: mol_type = other RNA
tagggctgaacagagaagagc

SEQ ID NO: 18102 - RNA, 21 nt, synthetic construct
  source 1..21: mol_type = other RNA
taggggaggggggcaaggaga

SEQ ID NO: 18103 - RNA, 21 nt, synthetic construct
  source 1..21: mol_type = other RNA
tagggggttgggggctagagt

SEQ ID NO: 18104 - RNA, 21 nt, synthetic construct
  source 1..21: mol_type = other RNA
taggggtccaaaacttggggg

SEQ ID NO: 18105 - RNA, 21 nt, synthetic construct
  source 1..21: mol_type = other RNA
tagggtaccccacgtgggttt

SEQ ID NO: 18106 - RNA, 21 nt, synthetic construct
  source 1..21: mol_type = other RNA
taggtggcctggggcctctgg

SEQ ID NO: 18107 - RNA, 21 nt, synthetic construct
  source 1..21: mol_type = other RNA
taggtgttcaccaggtcgtgg

SEQ ID NO: 18108 - RNA, 21 nt, synthetic construct
  source 1..21: mol_type = other RNA
tagtccccaatttatattgtt

SEQ ID NO: 18109 - RNA, 21 nt, synthetic construct
  source 1..21: mol_type = other RNA
tagtctgagcactggaagcgc

SEQ ID NO: 18110 - RNA, 21 nt, synthetic construct
  source 1..21: mol_type = other RNA
tagtggctagggggttggggg

SEQ ID NO: 18111 - RNA, 21 nt, synthetic construct
  source 1..21: mol_type = other RNA
tagttttagcactgaaaccct

SEQ ID NO: 18112 - RNA, 21 nt, synthetic construct
  source 1..21: mol_type = other RNA
tataaattggggactagaaag

SEQ ID NO: 18113 - RNA, 21 nt, synthetic construct
  source 1..21: mol_type = other RNA
tatattgttcctccgtgcgtc

SEQ ID NO: 18114 - RNA, 21 nt, synthetic construct
  source 1..21: mol_type = other RNA
tatcaaccacttggtgaggct

SEQ ID NO: 18115 - RNA, 21 nt, synthetic construct
  source 1..21: mol_type = other RNA
tatcccaggaggcctggagca

SEQ ID NO: 18116 - RNA, 21 nt, synthetic construct
  source 1..21: mol_type = other RNA
tatcccgtggatctaggagtt

SEQ ID NO: 18117 - RNA, 21 nt, synthetic construct
  source 1..21: mol_type = other RNA
tatcgccatgacaactgggtg

SEQ ID NO: 18118 - RNA, 21 nt, synthetic construct
  source 1..21: mol_type = other RNA
tatctcacaggtaaaactgac

SEQ ID NO: 18119 - RNA, 21 nt, synthetic construct
  source 1..21: mol_type = other RNA
tatctgcaaacaggaagtgaa

SEQ ID NO: 18120 - RNA, 21 nt, synthetic construct
  source 1..21: mol_type = other RNA
tatctgctggggtggtttccg

SEQ ID NO: 18121 - RNA, 21 nt, synthetic construct
  source 1..21: mol_type = other RNA
tatctgggacatattcctccg

SEQ ID NO: 18122 - RNA, 21 nt, synthetic construct
  source 1..21: mol_type = other RNA
tatcttaaacagccagtggcc

SEQ ID NO: 18123 - RNA, 21 nt, synthetic construct
  source 1..21: mol_type = other RNA
tatgcagggtggaggaaggcc

SEQ ID NO: 18124 - RNA, 21 nt, synthetic construct
  source 1..21: mol_type = other RNA
tatgctgtttgcccaggacag

SEQ ID NO: 18125 - RNA, 21 nt, synthetic construct
  source 1..21: mol_type = other RNA
tatgtcccagatagcactggg

SEQ ID NO: 18126 - RNA, 21 nt, synthetic construct
  source 1..21: mol_type = other RNA
tattcctccgcccagagcagg

SEQ ID NO: 18127 - RNA, 21 nt, synthetic construct
  source 1..21: mol_type = other RNA
tattctgattttgtttttcca

SEQ ID NO: 18128 - RNA, 21 nt, synthetic construct
  source 1..21: mol_type = other RNA
tattgttcctccgtgcgtcag

SEQ ID NO: 18129 - RNA, 21 nt, synthetic construct
  source 1..21: mol_type = other RNA
tatttccacccagttgtcatg

SEQ ID NO: 18130 - RNA, 21 nt, synthetic construct
  source 1..21: mol_type = other RNA
tcaaacccagaagcccagagc

SEQ ID NO: 18131 - RNA, 21 nt, synthetic construct
  source 1..21: mol_type = other RNA
tcaaacccaggagcccaggcc

SEQ ID NO: 18132 - RNA, 21 nt, synthetic construct
  source 1..21: mol_type = other RNA
tcaaccacttggtgaggctgg

SEQ ID NO: 18133 - RNA, 21 nt, synthetic construct
  source 1..21: mol_type = other RNA
tcaacccaggaggccaggccc

SEQ ID NO: 18134 - RNA, 21 nt, synthetic construct
  source 1..21: mol_type = other RNA
tcaagagtcacccagagacag

SEQ ID NO: 18135 - RNA, 21 nt, synthetic construct
  source 1..21: mol_type = other RNA
tcaagctcggaaaccacccca

SEQ ID NO: 18136 - RNA, 21 nt, synthetic construct
  source 1..21: mol_type = other RNA
tcaaggacctgcccagtacag

SEQ ID NO: 18137 - RNA, 21 nt, synthetic construct
  source 1..21: mol_type = other RNA
tcacaaagggagttttccaca

SEQ ID NO: 18138 - RNA, 21 nt, synthetic construct
  source 1..21: mol_type = other RNA
tcacactccagttcactgagg

SEQ ID NO: 18139 - RNA, 21 nt, synthetic construct
  source 1..21: mol_type = other RNA
tcacagcccgagtttccatga

SEQ ID NO: 18140 - RNA, 21 nt, synthetic construct
  source 1..21: mol_type = other RNA
tcacagggatgcctgtactgg

SEQ ID NO: 18141 - RNA, 21 nt, synthetic construct
  source 1..21: mol_type = other RNA
tcacaggtaaaactgacgcac

SEQ ID NO: 18142 - RNA, 21 nt, synthetic construct
  source 1..21: mol_type = other RNA
tcaccaagtggttgataaacc

SEQ ID NO: 18143 - RNA, 21 nt, synthetic construct
  source 1..21: mol_type = other RNA
tcaccacagccctgccaggac

SEQ ID NO: 18144 - RNA, 21 nt, synthetic construct
  source 1..21: mol_type = other RNA
tcaccacccacaggtggcgct

SEQ ID NO: 18145 - RNA, 21 nt, synthetic construct
  source 1..21: mol_type = other RNA
tcaccaggtcgtggccgcctc

SEQ ID NO: 18146 - RNA, 21 nt, synthetic construct
  source 1..21: mol_type = other RNA
tcacccagagacagtgaccaa

SEQ ID NO: 18147 - RNA, 21 nt, synthetic construct
  source 1..21: mol_type = other RNA
tcaccccacacccagacctga

SEQ ID NO: 18148 - RNA, 21 nt, synthetic construct
  source 1..21: mol_type = other RNA
tcaccccacagttggaggaga

SEQ ID NO: 18149 - RNA, 21 nt, synthetic construct
  source 1..21: mol_type = other RNA
tcacccctctgggagtcccgc

SEQ ID NO: 18150 - RNA, 21 nt, synthetic construct
  source 1..21: mol_type = other RNA
tcacctctccaaagctgccca

SEQ ID NO: 18151 - RNA, 21 nt, synthetic construct
  source 1..21: mol_type = other RNA
tcacctttctagtccccaatt

SEQ ID NO: 18152 - RNA, 21 nt, synthetic construct
  source 1..21: mol_type = other RNA
tcactccttcctcagctccag

SEQ ID NO: 18153 - RNA, 21 nt, synthetic construct
  source 1..21: mol_type = other RNA
tcactcttcggggtatcccag

SEQ ID NO: 18154 - RNA, 21 nt, synthetic construct
  source 1..21: mol_type = other RNA
tcactgaggccccctctgcac

SEQ ID NO: 18155 - RNA, 21 nt, synthetic construct
  source 1..21: mol_type = other RNA
tcactgatcctggtgctgcag

SEQ ID NO: 18156 - RNA, 21 nt, synthetic construct
  source 1..21: mol_type = other RNA
tcactgtctctgggtgactct

SEQ ID NO: 18157 - RNA, 21 nt, synthetic construct
  source 1..21: mol_type = other RNA
tcacttcctgtttgcagatag

SEQ ID NO: 18158 - RNA, 21 nt, synthetic construct
  source 1..21: mol_type = other RNA
tcagaataagttggtcctgag

SEQ ID NO: 18159 - RNA, 21 nt, synthetic construct
  source 1..21: mol_type = other RNA
tcagacccacgagtccaggcc

SEQ ID NO: 18160 - RNA, 21 nt, synthetic construct
  source 1..21: mol_type = other RNA
tcagacccaggggtccaggcc

SEQ ID NO: 18161 - RNA, 21 nt, synthetic construct
  source 1..21: mol_type = other RNA
tcagactagggaagaggttcc

SEQ ID NO: 18162 - RNA, 21 nt, synthetic construct
  source 1..21: mol_type = other RNA
tcagactgagccccgttcccc

SEQ ID NO: 18163 - RNA, 21 nt, synthetic construct
  source 1..21: mol_type = other RNA
tcagagaggagggattccctt

SEQ ID NO: 18164 - RNA, 21 nt, synthetic construct
  source 1..21: mol_type = other RNA
tcagagcagctcaggttctgg

SEQ ID NO: 18165 - RNA, 21 nt, synthetic construct
  source 1..21: mol_type = other RNA
tcagagccaggagtcctggcc

SEQ ID NO: 18166 - RNA, 21 nt, synthetic construct
  source 1..21: mol_type = other RNA
tcagatgaaggagtccaggcc

SEQ ID NO: 18167 - RNA, 21 nt, synthetic construct
  source 1..21: mol_type = other RNA
tcagcccctggctgcagggcc

SEQ ID NO: 18168 - RNA, 21 nt, synthetic construct
  source 1..21: mol_type = other RNA
tcagccctaagaatcctggct

SEQ ID NO: 18169 - RNA, 21 nt, synthetic construct
  source 1..21: mol_type = other RNA
tcagctccagttcaggtcccg

SEQ ID NO: 18170 - RNA, 21 nt, synthetic construct
  source 1..21: mol_type = other RNA
tcaggaccaacttattctgat

SEQ ID NO: 18171 - RNA, 21 nt, synthetic construct
  source 1..21: mol_type = other RNA
tcaggcatctttcacagggat

SEQ ID NO: 18172 - RNA, 21 nt, synthetic construct
  source 1..21: mol_type = other RNA
tcaggccggccaggccttcag

SEQ ID NO: 18173 - RNA, 21 nt, synthetic construct
  source 1..21: mol_type = other RNA
tcaggcttccctgtccccctt

SEQ ID NO: 18174 - RNA, 21 nt, synthetic construct
  source 1..21: mol_type = other RNA
tcaggggcctgggcgggactc

SEQ ID NO: 18175 - RNA, 21 nt, synthetic construct
  source 1..21: mol_type = other RNA
tcaggtcccggagcccaccca

SEQ ID NO: 18176 - RNA, 21 nt, synthetic construct
  source 1..21: mol_type = other RNA
tcaggtctgggtgtggggtga

SEQ ID NO: 18177 - RNA, 21 nt, synthetic construct
  source 1..21: mol_type = other RNA
tcaggttacgtggccaagaag

SEQ ID NO: 18178 - RNA, 21 nt, synthetic construct
  source 1..21: mol_type = other RNA
tcaggttctgggagagggtag

SEQ ID NO: 18179 - RNA, 21 nt, synthetic construct
  source 1..21: mol_type = other RNA
tcagtcctaggaaaacaggga

SEQ ID NO: 18180 - RNA, 21 nt, synthetic construct
  source 1..21: mol_type = other RNA
tcagtctgaagagcagagcca

SEQ ID NO: 18181 - RNA, 21 nt, synthetic construct
  source 1..21: mol_type = other RNA
tcagtgaaacgcaccagacgg

SEQ ID NO: 18182 - RNA, 21 nt, synthetic construct
  source 1..21: mol_type = other RNA
tcagtgaactggagtgtgaca

SEQ ID NO: 18183 - RNA, 21 nt, synthetic construct
  source 1..21: mol_type = other RNA
tcagtgctaaaactaggctgt

SEQ ID NO: 18184 - RNA, 21 nt, synthetic construct
  source 1..21: mol_type = other RNA
tcagtgctcagtggaaaccac

SEQ ID NO: 18185 - RNA, 21 nt, synthetic construct
  source 1..21: mol_type = other RNA
tcagtggaaaccacgaaagga

SEQ ID NO: 18186 - RNA, 21 nt, synthetic construct
  source 1..21: mol_type = other RNA
tcagtggccaccctgcgctac

SEQ ID NO: 18187 - RNA, 21 nt, synthetic construct
  source 1..21: mol_type = other RNA
tcagttttacctgtgagataa

SEQ ID NO: 18188 - RNA, 21 nt, synthetic construct
  source 1..21: mol_type = other RNA
tcatcccgttcccagggcacg

SEQ ID NO: 18189 - RNA, 21 nt, synthetic construct
  source 1..21: mol_type = other RNA
tcatctgagggcggaagggct

SEQ ID NO: 18190 - RNA, 21 nt, synthetic construct
  source 1..21: mol_type = other RNA
tcatctgggtgcgggaacccc

SEQ ID NO: 18191 - RNA, 21 nt, synthetic construct
  source 1..21: mol_type = other RNA
tcatgcccctggctctcctgc

SEQ ID NO: 18192 - RNA, 21 nt, synthetic construct
  source 1..21: mol_type = other RNA
tcatgctcttggccctcgtag

SEQ ID NO: 18193 - RNA, 21 nt, synthetic construct
  source 1..21: mol_type = other RNA
tcatggaaactcgggctgtga

SEQ ID NO: 18194 - RNA, 21 nt, synthetic construct
  source 1..21: mol_type = other RNA
tcatggcgataggggaggggg

SEQ ID NO: 18195 - RNA, 21 nt, synthetic construct
  source 1..21: mol_type = other RNA
tcattcttcccttaggggtcc

SEQ ID NO: 18196 - RNA, 21 nt, synthetic construct
  source 1..21: mol_type = other RNA
tcattttccccactgtcctag

SEQ ID NO: 18197 - RNA, 21 nt, synthetic construct
  source 1..21: mol_type = other RNA
tccaaaacttggggggacaaa

SEQ ID NO: 18198 - RNA, 21 nt, synthetic construct
  source 1..21: mol_type = other RNA
tccaaactgcttctcctcttg

SEQ ID NO: 18199 - RNA, 21 nt, synthetic construct
  source 1..21: mol_type = other RNA
tccaaagctgcccatctggag

SEQ ID NO: 18200 - RNA, 21 nt, synthetic construct
  source 1..21: mol_type = other RNA
tccaactgtggggtgactgct

SEQ ID NO: 18201 - RNA, 21 nt, synthetic construct
  source 1..21: mol_type = other RNA
tccaagggtcaagctcggaaa

SEQ ID NO: 18202 - RNA, 21 nt, synthetic construct
  source 1..21: mol_type = other RNA
tccacaaggcctggggcaagt

SEQ ID NO: 18203 - RNA, 21 nt, synthetic construct
  source 1..21: mol_type = other RNA
tccacacggacacccccctcc

SEQ ID NO: 18204 - RNA, 21 nt, synthetic construct
  source 1..21: mol_type = other RNA
tccaccatctcatgcccctgg

SEQ ID NO: 18205 - RNA, 21 nt, synthetic construct
  source 1..21: mol_type = other RNA
tccacccaaaaggcagcctgg

SEQ ID NO: 18206 - RNA, 21 nt, synthetic construct
  source 1..21: mol_type = other RNA
tccacccagttgtcatggcga

SEQ ID NO: 18207 - RNA, 21 nt, synthetic construct
  source 1..21: mol_type = other RNA
tccaccctgcatagccctggg

SEQ ID NO: 18208 - RNA, 21 nt, synthetic construct
  source 1..21: mol_type = other RNA
tccacctggggctgtgtttct

SEQ ID NO: 18209 - RNA, 21 nt, synthetic construct
  source 1..21: mol_type = other RNA
tccacgggataaattaccccc

SEQ ID NO: 18210 - RNA, 21 nt, synthetic construct
  source 1..21: mol_type = other RNA
tccactgagcactgaaggcct

SEQ ID NO: 18211 - RNA, 21 nt, synthetic construct
  source 1..21: mol_type = other RNA
tccagagggagccacgaaaac

SEQ ID NO: 18212 - RNA, 21 nt, synthetic construct
  source 1..21: mol_type = other RNA
tccagagtccaggcccaaccc

SEQ ID NO: 18213 - RNA, 21 nt, synthetic construct
  source 1..21: mol_type = other RNA
tccagatgggcagctttggag

SEQ ID NO: 18214 - RNA, 21 nt, synthetic construct
  source 1..21: mol_type = other RNA
tccagcccctcctactctagc

SEQ ID NO: 18215 - RNA, 21 nt, synthetic construct
  source 1..21: mol_type = other RNA
tccagcccctcctccttcaga

SEQ ID NO: 18216 - RNA, 21 nt, synthetic construct
  source 1..21: mol_type = other RNA
tccaggcaggtccccaagcat

SEQ ID NO: 18217 - RNA, 21 nt, synthetic construct
  source 1..21: mol_type = other RNA
tccaggccaagtaggtggcct

SEQ ID NO: 18218 - RNA, 21 nt, synthetic construct
  source 1..21: mol_type = other RNA
tccaggcccaacccctcccca

SEQ ID NO: 18219 - RNA, 21 nt, synthetic construct
  source 1..21: mol_type = other RNA
tccaggcccagccccgcctcc

SEQ ID NO: 18220 - RNA, 21 nt, synthetic construct
  source 1..21: mol_type = other RNA
tccaggccccagcccctcctc

SEQ ID NO: 18221 - RNA, 21 nt, synthetic construct
  source 1..21: mol_type = other RNA
tccaggcccccagcctctccc

SEQ ID NO: 18222 - RNA, 21 nt, synthetic construct
  source 1..21: mol_type = other RNA
tccaggcccccagtccctcca

SEQ ID NO: 18223 - RNA, 21 nt, synthetic construct
  source 1..21: mol_type = other RNA
tccaggcctcctgggataccc

SEQ ID NO: 18224 - RNA, 21 nt, synthetic construct
  source 1..21: mol_type = other RNA
tccagggacacggtgctagga

SEQ ID NO: 18225 - RNA, 21 nt, synthetic construct
  source 1..21: mol_type = other RNA
tccagggggtcggaggaggga

SEQ ID NO: 18226 - RNA, 21 nt, synthetic construct
  source 1..21: mol_type = other RNA
tccagtgctcagactagggaa

SEQ ID NO: 18227 - RNA, 21 nt, synthetic construct
  source 1..21: mol_type = other RNA
tccagttcactgaggccccct

SEQ ID NO: 18228 - RNA, 21 nt, synthetic construct
  source 1..21: mol_type = other RNA
tccagttcaggtcccggagcc

SEQ ID NO: 18229 - RNA, 21 nt, synthetic construct
  source 1..21: mol_type = other RNA
tccatccttctttccttaaag

SEQ ID NO: 18230 - RNA, 21 nt, synthetic construct
  source 1..21: mol_type = other RNA
tccatgacctcatgctcttgg

SEQ ID NO: 18231 - RNA, 21 nt, synthetic construct
  source 1..21: mol_type = other RNA
tcccaagaggagaagcagttt

SEQ ID NO: 18232 - RNA, 21 nt, synthetic construct
  source 1..21: mol_type = other RNA
tcccaagttcttagggtaccc

SEQ ID NO: 18233 - RNA, 21 nt, synthetic construct
  source 1..21: mol_type = other RNA
tcccagaacctgagctgctct

SEQ ID NO: 18234 - RNA, 21 nt, synthetic construct
  source 1..21: mol_type = other RNA
tcccagaggggtgagacagct

SEQ ID NO: 18235 - RNA, 21 nt, synthetic construct
  source 1..21: mol_type = other RNA
tcccagatagcactggggact

SEQ ID NO: 18236 - RNA, 21 nt, synthetic construct
  source 1..21: mol_type = other RNA
tcccagcaagtcgggactcca

SEQ ID NO: 18237 - RNA, 21 nt, synthetic construct
  source 1..21: mol_type = other RNA
tcccagcacagggtggccttc

SEQ ID NO: 18238 - RNA, 21 nt, synthetic construct
  source 1..21: mol_type = other RNA
tcccaggaggcctggagcatt

SEQ ID NO: 18239 - RNA, 21 nt, synthetic construct
  source 1..21: mol_type = other RNA
tcccagggcacgtgcggcccc

SEQ ID NO: 18240 - RNA, 21 nt, synthetic construct
  source 1..21: mol_type = other RNA
tccccaagcatcgcccccctg

SEQ ID NO: 18241 - RNA, 21 nt, synthetic construct
  source 1..21: mol_type = other RNA
tccccaatttatattgttcct

SEQ ID NO: 18242 - RNA, 21 nt, synthetic construct
  source 1..21: mol_type = other RNA
tccccactgtcctagcaccgt

SEQ ID NO: 18243 - RNA, 21 nt, synthetic construct
  source 1..21: mol_type = other RNA
tccccagtgctatctgggaca

SEQ ID NO: 18244 - RNA, 21 nt, synthetic construct
  source 1..21: mol_type = other RNA
tccccattcaacccaggaggc

SEQ ID NO: 18245 - RNA, 21 nt, synthetic construct
  source 1..21: mol_type = other RNA
tccccattcagacccaggggt

SEQ ID NO: 18246 - RNA, 21 nt, synthetic construct
  source 1..21: mol_type = other RNA
tcccccagaggccccaggcca

SEQ ID NO: 18247 - RNA, 21 nt, synthetic construct
  source 1..21: mol_type = other RNA
tccccccaagttttggacccc

SEQ ID NO: 18248 - RNA, 21 nt, synthetic construct
  source 1..21: mol_type = other RNA
tcccccttcccctgcatcccc

SEQ ID NO: 18249 - RNA, 21 nt, synthetic construct
  source 1..21: mol_type = other RNA
tcccccttcctcgtccaccat

SEQ ID NO: 18250 - RNA, 21 nt, synthetic construct
  source 1..21: mol_type = other RNA
tccccgttcacttcctgtttg

SEQ ID NO: 18251 - RNA, 21 nt, synthetic construct
  source 1..21: mol_type = other RNA
tccccgttcccctgcatcccc

SEQ ID NO: 18252 - RNA, 21 nt, synthetic construct
  source 1..21: mol_type = other RNA
tcccctatcgccatgacaact

SEQ ID NO: 18253 - RNA, 21 nt, synthetic construct
  source 1..21: mol_type = other RNA
tcccctgcatcccccagaggc

SEQ ID NO: 18254 - RNA, 21 nt, synthetic construct
  source 1..21: mol_type = other RNA
tcccctgcatcccccttcccc

SEQ ID NO: 18255 - RNA, 21 nt, synthetic construct
  source 1..21: mol_type = other RNA
tcccctgcatccccgttcccc

SEQ ID NO: 18256 - RNA, 21 nt, synthetic construct
  source 1..21: mol_type = other RNA
tcccctgcttcttggccacgt

SEQ ID NO: 18257 - RNA, 21 nt, synthetic construct
  source 1..21: mol_type = other RNA
tcccgcacccagatgagaagc

SEQ ID NO: 18258 - RNA, 21 nt, synthetic construct
  source 1..21: mol_type = other RNA
tcccgcccaggcccctgagtc

SEQ ID NO: 18259 - RNA, 21 nt, synthetic construct
  source 1..21: mol_type = other RNA
tcccgcctcctccagatgggc

SEQ ID NO: 18260 - RNA, 21 nt, synthetic construct
  source 1..21: mol_type = other RNA
tcccgcttccctaaggccctg

SEQ ID NO: 18261 - RNA, 21 nt, synthetic construct
  source 1..21: mol_type = other RNA
tcccggagcccacccagtgtc

SEQ ID NO: 18262 - RNA, 21 nt, synthetic construct
  source 1..21: mol_type = other RNA
tcccggccagtttctccacct

SEQ ID NO: 18263 - RNA, 21 nt, synthetic construct
  source 1..21: mol_type = other RNA
tcccgtggatctaggagttta

SEQ ID NO: 18264 - RNA, 21 nt, synthetic construct
  source 1..21: mol_type = other RNA
tcccgttcccagggcacgtgc

SEQ ID NO: 18265 - RNA, 21 nt, synthetic construct
  source 1..21: mol_type = other RNA
tccctaagacccagaagtcca

SEQ ID NO: 18266 - RNA, 21 nt, synthetic construct
  source 1..21: mol_type = other RNA
tccctaaggccctgctctggg

SEQ ID NO: 18267 - RNA, 21 nt, synthetic construct
  source 1..21: mol_type = other RNA
tccctacaggggttcctggct

SEQ ID NO: 18268 - RNA, 21 nt, synthetic construct
  source 1..21: mol_type = other RNA
tccctagtctgagcactggaa

SEQ ID NO: 18269 - RNA, 21 nt, synthetic construct
  source 1..21: mol_type = other RNA
tccctcacctctccaaagctg

SEQ ID NO: 18270 - RNA, 21 nt, synthetic construct
  source 1..21: mol_type = other RNA
tccctccaccctcagacccag

SEQ ID NO: 18271 - RNA, 21 nt, synthetic construct
  source 1..21: mol_type = other RNA
tccctcccgcctcctccagat

SEQ ID NO: 18272 - RNA, 21 nt, synthetic construct
  source 1..21: mol_type = other RNA
tccctcctccgaccccctgga

SEQ ID NO: 18273 - RNA, 21 nt, synthetic construct
  source 1..21: mol_type = other RNA
tccctcctctctgaaccccag

SEQ ID NO: 18274 - RNA, 21 nt, synthetic construct
  source 1..21: mol_type = other RNA
tccctcggacccaggagtcca

SEQ ID NO: 18275 - RNA, 21 nt, synthetic construct
  source 1..21: mol_type = other RNA
tccctctggagtcccgacttg

SEQ ID NO: 18276 - RNA, 21 nt, synthetic construct
  source 1..21: mol_type = other RNA
tccctggatctgttttcgtgg

SEQ ID NO: 18277 - RNA, 21 nt, synthetic construct
  source 1..21: mol_type = other RNA
tccctggtgcccaggcctcag

SEQ ID NO: 18278 - RNA, 21 nt, synthetic construct
  source 1..21: mol_type = other RNA
tccctgtcccccttcctcgtc

SEQ ID NO: 18279 - RNA, 21 nt, synthetic construct
  source 1..21: mol_type = other RNA
tccctgtgaaagatgcctgag

SEQ ID NO: 18280 - RNA, 21 nt, synthetic construct
  source 1..21: mol_type = other RNA
tccctgttttcctaggactga

SEQ ID NO: 18281 - RNA, 21 nt, synthetic construct
  source 1..21: mol_type = other RNA
tcccttaggggtccaaaactt

SEQ ID NO: 18282 - RNA, 21 nt, synthetic construct
  source 1..21: mol_type = other RNA
tcccttccccgttcacttcct

SEQ ID NO: 18283 - RNA, 21 nt, synthetic construct
  source 1..21: mol_type = other RNA
tcccttctcaggttacgtggc

SEQ ID NO: 18284 - RNA, 21 nt, synthetic construct
  source 1..21: mol_type = other RNA
tccctttcaaggacctgccca

SEQ ID NO: 18285 - RNA, 21 nt, synthetic construct
  source 1..21: mol_type = other RNA
tccctttctctttctccatcc

SEQ ID NO: 18286 - RNA, 21 nt, synthetic construct
  source 1..21: mol_type = other RNA
tccctttgtgagaatggtgcg

SEQ ID NO: 18287 - RNA, 21 nt, synthetic construct
  source 1..21: mol_type = other RNA
tccgaccccctggacttcggc

SEQ ID NO: 18288 - RNA, 21 nt, synthetic construct
  source 1..21: mol_type = other RNA
tccgagcttgacccttggaag

SEQ ID NO: 18289 - RNA, 21 nt, synthetic construct
  source 1..21: mol_type = other RNA
tccgcccagagcagggtcccg

SEQ ID NO: 18290 - RNA, 21 nt, synthetic construct
  source 1..21: mol_type = other RNA
tccgccctcagatgaaggagt

SEQ ID NO: 18291 - RNA, 21 nt, synthetic construct
  source 1..21: mol_type = other RNA
tccgggacctgaactggagct

SEQ ID NO: 18292 - RNA, 21 nt, synthetic construct
  source 1..21: mol_type = other RNA
tccgtgcgtcagttttacctg

SEQ ID NO: 18293 - RNA, 21 nt, synthetic construct
  source 1..21: mol_type = other RNA
tccgtgtggaaaactcccttt

SEQ ID NO: 18294 - RNA, 21 nt, synthetic construct
  source 1..21: mol_type = other RNA
tcctactctagcccccaaccc

SEQ ID NO: 18295 - RNA, 21 nt, synthetic construct
  source 1..21: mol_type = other RNA
tcctagatccacgggataaat

SEQ ID NO: 18296 - RNA, 21 nt, synthetic construct
  source 1..21: mol_type = other RNA
tcctagcaccgtgtccctgga

SEQ ID NO: 18297 - RNA, 21 nt, synthetic construct
  source 1..21: mol_type = other RNA
tcctaggaaaacagggatggt

SEQ ID NO: 18298 - RNA, 21 nt, synthetic construct
  source 1..21: mol_type = other RNA
tcctaggactgagggtttcag

SEQ ID NO: 18299 - RNA, 21 nt, synthetic construct
  source 1..21: mol_type = other RNA
tcctaggtgttcaccaggtcg

SEQ ID NO: 18300 - RNA, 21 nt, synthetic construct
  source 1..21: mol_type = other RNA
tcctcaccacagccctgccag

SEQ ID NO: 18301 - RNA, 21 nt, synthetic construct
  source 1..21: mol_type = other RNA
tcctcagctccagttcaggtc

SEQ ID NO: 18302 - RNA, 21 nt, synthetic construct
  source 1..21: mol_type = other RNA
tcctccaactgtggggtgact

SEQ ID NO: 18303 - RNA, 21 nt, synthetic construct
  source 1..21: mol_type = other RNA
tcctccaccctgcatagccct

SEQ ID NO: 18304 - RNA, 21 nt, synthetic construct
  source 1..21: mol_type = other RNA
tcctccagatgggcagctttg

SEQ ID NO: 18305 - RNA, 21 nt, synthetic construct
  source 1..21: mol_type = other RNA
tcctccgaccccctggacttc

SEQ ID NO: 18306 - RNA, 21 nt, synthetic construct
  source 1..21: mol_type = other RNA
tcctccgcccagagcagggtc

SEQ ID NO: 18307 - RNA, 21 nt, synthetic construct
  source 1..21: mol_type = other RNA
tcctccgtgcgtcagttttac

SEQ ID NO: 18308 - RNA, 21 nt, synthetic construct
  source 1..21: mol_type = other RNA
tcctccttcagagccaggagt

SEQ ID NO: 18309 - RNA, 21 nt, synthetic construct
  source 1..21: mol_type = other RNA
tcctcgtccaccatctcatgc

SEQ ID NO: 18310 - RNA, 21 nt, synthetic construct
  source 1..21: mol_type = other RNA
tcctctctcaaacccaggagc

SEQ ID NO: 18311 - RNA, 21 nt, synthetic construct
  source 1..21: mol_type = other RNA
tcctctctgaaccccagccca

SEQ ID NO: 18312 - RNA, 21 nt, synthetic construct
  source 1..21: mol_type = other RNA
tcctcttgggaagtgtaagga

SEQ ID NO: 18313 - RNA, 21 nt, synthetic construct
  source 1..21: mol_type = other RNA
tcctgagttctaactttggct

SEQ ID NO: 18314 - RNA, 21 nt, synthetic construct
  source 1..21: mol_type = other RNA
tcctgcaccccaattgcctta

SEQ ID NO: 18315 - RNA, 21 nt, synthetic construct
  source 1..21: mol_type = other RNA
tcctgcagagtatctgctggg

SEQ ID NO: 18316 - RNA, 21 nt, synthetic construct
  source 1..21: mol_type = other RNA
tcctgcatccttctccaggca

SEQ ID NO: 18317 - RNA, 21 nt, synthetic construct
  source 1..21: mol_type = other RNA
tcctgccccttccctacaggg

SEQ ID NO: 18318 - RNA, 21 nt, synthetic construct
  source 1..21: mol_type = other RNA
tcctgccttaaacccagccag

SEQ ID NO: 18319 - RNA, 21 nt, synthetic construct
  source 1..21: mol_type = other RNA
tcctggcagggctgtggtgag

SEQ ID NO: 18320 - RNA, 21 nt, synthetic construct
  source 1..21: mol_type = other RNA
tcctggcccccagcccctcct

SEQ ID NO: 18321 - RNA, 21 nt, synthetic construct
  source 1..21: mol_type = other RNA
tcctggctatctgcaaacagg

SEQ ID NO: 18322 - RNA, 21 nt, synthetic construct
  source 1..21: mol_type = other RNA
tcctggctccagcccctccta

SEQ ID NO: 18323 - RNA, 21 nt, synthetic construct
  source 1..21: mol_type = other RNA
tcctggctctgaaggaggagg

SEQ ID NO: 18324 - RNA, 21 nt, synthetic construct
  source 1..21: mol_type = other RNA
tcctggctctgctcttcagac

SEQ ID NO: 18325 - RNA, 21 nt, synthetic construct
  source 1..21: mol_type = other RNA
tcctgggataccccgaagagt

SEQ ID NO: 18326 - RNA, 21 nt, synthetic construct
  source 1..21: mol_type = other RNA
tcctgggcaaacagcataagc

SEQ ID NO: 18327 - RNA, 21 nt, synthetic construct
  source 1..21: mol_type = other RNA
tcctgggcttgccaaggactc

SEQ ID NO: 18328 - RNA, 21 nt, synthetic construct
  source 1..21: mol_type = other RNA
tcctgggtctgagggtggagg

SEQ ID NO: 18329 - RNA, 21 nt, synthetic construct
  source 1..21: mol_type = other RNA
tcctgggttgaatggggaggg

SEQ ID NO: 18330 - RNA, 21 nt, synthetic construct
  source 1..21: mol_type = other RNA
tcctgggtttgagagaggagg

SEQ ID NO: 18331 - RNA, 21 nt, synthetic construct
  source 1..21: mol_type = other RNA
tcctggtgctgcagcttcctt

SEQ ID NO: 18332 - RNA, 21 nt, synthetic construct
  source 1..21: mol_type = other RNA
tcctgtttgcagatagccagg

SEQ ID NO: 18333 - RNA, 21 nt, synthetic construct
  source 1..21: mol_type = other RNA
tccttaaagagtccccagtgc

SEQ ID NO: 18334 - RNA, 21 nt, synthetic construct
  source 1..21: mol_type = other RNA
tccttacacttcccaagagga

SEQ ID NO: 18335 - RNA, 21 nt, synthetic construct
  source 1..21: mol_type = other RNA
tccttcagagccaggagtcct

SEQ ID NO: 18336 - RNA, 21 nt, synthetic construct
  source 1..21: mol_type = other RNA
tccttcatctgagggcggaag

SEQ ID NO: 18337 - RNA, 21 nt, synthetic construct
  source 1..21: mol_type = other RNA
tccttccaagggtcaagctcg

SEQ ID NO: 18338 - RNA, 21 nt, synthetic construct
  source 1..21: mol_type = other RNA
tccttcctcagctccagttca

SEQ ID NO: 18339 - RNA, 21 nt, synthetic construct
  source 1..21: mol_type = other RNA
tccttctccaggcaggtcccc

SEQ ID NO: 18340 - RNA, 21 nt, synthetic construct
  source 1..21: mol_type = other RNA
tccttctttccttaaagagtc

SEQ ID NO: 18341 - RNA, 21 nt, synthetic construct
  source 1..21: mol_type = other RNA
tccttgaaagggaaaggccca

SEQ ID NO: 18342 - RNA, 21 nt, synthetic construct
  source 1..21: mol_type = other RNA
tccttgcccccctcccctatc

SEQ ID NO: 18343 - RNA, 21 nt, synthetic construct
  source 1..21: mol_type = other RNA
tccttggcaagcccaggagag

SEQ ID NO: 18344 - RNA, 21 nt, synthetic construct
  source 1..21: mol_type = other RNA
tcctttcgtggtttccactga

SEQ ID NO: 18345 - RNA, 21 nt, synthetic construct
  source 1..21: mol_type = other RNA
tcgccatgacaactgggtgga

SEQ ID NO: 18346 - RNA, 21 nt, synthetic construct
  source 1..21: mol_type = other RNA
tcgcccccctgctgtggctgt

SEQ ID NO: 18347 - RNA, 21 nt, synthetic construct
  source 1..21: mol_type = other RNA
tcggaaaccaccccagcagat

SEQ ID NO: 18348 - RNA, 21 nt, synthetic construct
  source 1..21: mol_type = other RNA
tcggacccaggagtccaggcc

SEQ ID NO: 18349 - RNA, 21 nt, synthetic construct
  source 1..21: mol_type = other RNA
tcggaggagggacttgcccca

SEQ ID NO: 18350 - RNA, 21 nt, synthetic construct
  source 1..21: mol_type = other RNA
tcggctcgtttatttccaccc

SEQ ID NO: 18351 - RNA, 21 nt, synthetic construct
  source 1..21: mol_type = other RNA
tcggcttttgtccccccaagt

SEQ ID NO: 18352 - RNA, 21 nt, synthetic construct
  source 1..21: mol_type = other RNA
tcgggactccagagggagcca

SEQ ID NO: 18353 - RNA, 21 nt, synthetic construct
  source 1..21: mol_type = other RNA
tcgggctgtgaaggggccgca

SEQ ID NO: 18354 - RNA, 21 nt, synthetic construct
  source 1..21: mol_type = other RNA
tcggggtatcccaggaggcct

SEQ ID NO: 18355 - RNA, 21 nt, synthetic construct
  source 1..21: mol_type = other RNA
tcgtagctccctcccgcctcc

SEQ ID NO: 18356 - RNA, 21 nt, synthetic construct
  source 1..21: mol_type = other RNA
tcgtccaccatctcatgcccc

SEQ ID NO: 18357 - RNA, 21 nt, synthetic construct
  source 1..21: mol_type = other RNA
tcgtcctgcatccttctccag

SEQ ID NO: 18358 - RNA, 21 nt, synthetic construct
  source 1..21: mol_type = other RNA
tcgtggccgcctctactccct

SEQ ID NO: 18359 - RNA, 21 nt, synthetic construct
  source 1..21: mol_type = other RNA
tcgtggctccctctggagtcc

SEQ ID NO: 18360 - RNA, 21 nt, synthetic construct
  source 1..21: mol_type = other RNA
tcgtggggtccaggccaagta

SEQ ID NO: 18361 - RNA, 21 nt, synthetic construct
  source 1..21: mol_type = other RNA
tcgtgggtctgagggaggagg

SEQ ID NO: 18362 - RNA, 21 nt, synthetic construct
  source 1..21: mol_type = other RNA
tcgtggtttccactgagcact

SEQ ID NO: 18363 - RNA, 21 nt, synthetic construct
  source 1..21: mol_type = other RNA
tcgttcctgcagagtatctgc

SEQ ID NO: 18364 - RNA, 21 nt, synthetic construct
  source 1..21: mol_type = other RNA
tcgtttatttccacccagttg

SEQ ID NO: 18365 - RNA, 21 nt, synthetic construct
  source 1..21: mol_type = other RNA
tctaacaggtaccatgtgggg

SEQ ID NO: 18366 - RNA, 21 nt, synthetic construct
  source 1..21: mol_type = other RNA
tctaactttggctcttcacct

SEQ ID NO: 18367 - RNA, 21 nt, synthetic construct
  source 1..21: mol_type = other RNA
tctaccaggctgccttttggg

SEQ ID NO: 18368 - RNA, 21 nt, synthetic construct
  source 1..21: mol_type = other RNA
tctactccctttctctttctc

SEQ ID NO: 18369 - RNA, 21 nt, synthetic construct
  source 1..21: mol_type = other RNA
tctagcccccaaccccctagc

SEQ ID NO: 18370 - RNA, 21 nt, synthetic construct
  source 1..21: mol_type = other RNA
tctaggagtttagcttcactc

SEQ ID NO: 18371 - RNA, 21 nt, synthetic construct
  source 1..21: mol_type = other RNA
tctagtccccaatttatattg

SEQ ID NO: 18372 - RNA, 21 nt, synthetic construct
  source 1..21: mol_type = other RNA
tctcaaacccaggagcccagg

SEQ ID NO: 18373 - RNA, 21 nt, synthetic construct
  source 1..21: mol_type = other RNA
tctcacaaagggagttttcca

SEQ ID NO: 18374 - RNA, 21 nt, synthetic construct
  source 1..21: mol_type = other RNA
tctcacaggtaaaactgacgc

SEQ ID NO: 18375 - RNA, 21 nt, synthetic construct
  source 1..21: mol_type = other RNA
tctcacccctctgggagtccc

SEQ ID NO: 18376 - RNA, 21 nt, synthetic construct
  source 1..21: mol_type = other RNA
tctcaggttacgtggccaaga

SEQ ID NO: 18377 - RNA, 21 nt, synthetic construct
  source 1..21: mol_type = other RNA
tctcagtggccaccctgcgct

SEQ ID NO: 18378 - RNA, 21 nt, synthetic construct
  source 1..21: mol_type = other RNA
tctcatctgggtgcgggaacc

SEQ ID NO: 18379 - RNA, 21 nt, synthetic construct
  source 1..21: mol_type = other RNA
tctcatgcccctggctctcct

SEQ ID NO: 18380 - RNA, 21 nt, synthetic construct
  source 1..21: mol_type = other RNA
tctcattcttcccttaggggt

SEQ ID NO: 18381 - RNA, 21 nt, synthetic construct
  source 1..21: mol_type = other RNA
tctccaaagctgcccatctgg

SEQ ID NO: 18382 - RNA, 21 nt, synthetic construct
  source 1..21: mol_type = other RNA
tctccacctggggctgtgttt

SEQ ID NO: 18383 - RNA, 21 nt, synthetic construct
  source 1..21: mol_type = other RNA
tctccaggcaggtccccaagc

SEQ ID NO: 18384 - RNA, 21 nt, synthetic construct
  source 1..21: mol_type = other RNA
tctccatccttctttccttaa

SEQ ID NO: 18385 - RNA, 21 nt, synthetic construct
  source 1..21: mol_type = other RNA
tctcccagaacctgagctgct

SEQ ID NO: 18386 - RNA, 21 nt, synthetic construct
  source 1..21: mol_type = other RNA
tctccccattcagacccaggg

SEQ ID NO: 18387 - RNA, 21 nt, synthetic construct
  source 1..21: mol_type = other RNA
tctcctccaactgtggggtga

SEQ ID NO: 18388 - RNA, 21 nt, synthetic construct
  source 1..21: mol_type = other RNA
tctcctcttgggaagtgtaag

SEQ ID NO: 18389 - RNA, 21 nt, synthetic construct
  source 1..21: mol_type = other RNA
tctcctgccccttccctacag

SEQ ID NO: 18390 - RNA, 21 nt, synthetic construct
  source 1..21: mol_type = other RNA
tctcctgggcttgccaaggac

SEQ ID NO: 18391 - RNA, 21 nt, synthetic construct
  source 1..21: mol_type = other RNA
tctccttgcccccctccccta

SEQ ID NO: 18392 - RNA, 21 nt, synthetic construct
  source 1..21: mol_type = other RNA
tctcgtcctgcatccttctcc

SEQ ID NO: 18393 - RNA, 21 nt, synthetic construct
  source 1..21: mol_type = other RNA
tctcgtggggtccaggccaag

SEQ ID NO: 18394 - RNA, 21 nt, synthetic construct
  source 1..21: mol_type = other RNA
tctctcaaacccaggagccca

SEQ ID NO: 18395 - RNA, 21 nt, synthetic construct
  source 1..21: mol_type = other RNA
tctctgaaccccagcccaccc

SEQ ID NO: 18396 - RNA, 21 nt, synthetic construct
  source 1..21: mol_type = other RNA
tctctgggtgactcttgattc

SEQ ID NO: 18397 - RNA, 21 nt, synthetic construct
  source 1..21: mol_type = other RNA
tctctgttcagccctaagaat

SEQ ID NO: 18398 - RNA, 21 nt, synthetic construct
  source 1..21: mol_type = other RNA
tctctttctccatccttcttt

SEQ ID NO: 18399 - RNA, 21 nt, synthetic construct
  source 1..21: mol_type = other RNA
tctgaaccccagcccacccca

SEQ ID NO: 18400 - RNA, 21 nt, synthetic construct
  source 1..21: mol_type = other RNA
tctgaagagcagagccaggaa

SEQ ID NO: 18401 - RNA, 21 nt, synthetic construct
  source 1..21: mol_type = other RNA
tctgaaggaggaggggctgga

SEQ ID NO: 18402 - RNA, 21 nt, synthetic construct
  source 1..21: mol_type = other RNA
tctgaatggggagaggctggg

SEQ ID NO: 18403 - RNA, 21 nt, synthetic construct
  source 1..21: mol_type = other RNA
tctgacgcggccgtctggtgc

SEQ ID NO: 18404 - RNA, 21 nt, synthetic construct
  source 1..21: mol_type = other RNA
tctgagcactggaagcgccac

SEQ ID NO: 18405 - RNA, 21 nt, synthetic construct
  source 1..21: mol_type = other RNA
tctgagggcggaagggctggg

SEQ ID NO: 18406 - RNA, 21 nt, synthetic construct
  source 1..21: mol_type = other RNA
tctgagggtggagggactggg

SEQ ID NO: 18407 - RNA, 21 nt, synthetic construct
  source 1..21: mol_type = other RNA
tctgattttgtttttccaaac

SEQ ID NO: 18408 - RNA, 21 nt, synthetic construct
  source 1..21: mol_type = other RNA
tctgcaaacaggaagtgaacg

SEQ ID NO: 18409 - RNA, 21 nt, synthetic construct
  source 1..21: mol_type = other RNA
tctgcacggggccctgcagcc

SEQ ID NO: 18410 - RNA, 21 nt, synthetic construct
  source 1..21: mol_type = other RNA
tctgcaggaacgaagccgtgg

SEQ ID NO: 18411 - RNA, 21 nt, synthetic construct
  source 1..21: mol_type = other RNA
tctgctcttcagactgagccc

SEQ ID NO: 18412 - RNA, 21 nt, synthetic construct
  source 1..21: mol_type = other RNA
tctgctggggtggtttccgag

SEQ ID NO: 18413 - RNA, 21 nt, synthetic construct
  source 1..21: mol_type = other RNA
tctggaggaggcgggagggag

SEQ ID NO: 18414 - RNA, 21 nt, synthetic construct
  source 1..21: mol_type = other RNA
tctggagtcccgacttgctgg

SEQ ID NO: 18415 - RNA, 21 nt, synthetic construct
  source 1..21: mol_type = other RNA
tctggagtccctggtgcccag

SEQ ID NO: 18416 - RNA, 21 nt, synthetic construct
  source 1..21: mol_type = other RNA
tctggccactggctgtttaag

SEQ ID NO: 18417 - RNA, 21 nt, synthetic construct
  source 1..21: mol_type = other RNA
tctgggacatattcctccgcc

SEQ ID NO: 18418 - RNA, 21 nt, synthetic construct
  source 1..21: mol_type = other RNA
tctgggagagggtagcgcagg

SEQ ID NO: 18419 - RNA, 21 nt, synthetic construct
  source 1..21: mol_type = other RNA
tctgggagtcccgcccaggcc

SEQ ID NO: 18420 - RNA, 21 nt, synthetic construct
  source 1..21: mol_type = other RNA
tctgggcggaggaatatgtcc

SEQ ID NO: 18421 - RNA, 21 nt, synthetic construct
  source 1..21: mol_type = other RNA
tctgggcttctgggtttgagt

SEQ ID NO: 18422 - RNA, 21 nt, synthetic construct
  source 1..21: mol_type = other RNA
tctgggggatgcaggggaagg

SEQ ID NO: 18423 - RNA, 21 nt, synthetic construct
  source 1..21: mol_type = other RNA
tctgggtcttagggaggcggg

SEQ ID NO: 18424 - RNA, 21 nt, synthetic construct
  source 1..21: mol_type = other RNA
tctgggtgactcttgattccc

SEQ ID NO: 18425 - RNA, 21 nt, synthetic construct
  source 1..21: mol_type = other RNA
tctgggtgcgggaaccccaca

SEQ ID NO: 18426 - RNA, 21 nt, synthetic construct
  source 1..21: mol_type = other RNA
tctgggtgtggggtgaccagc

SEQ ID NO: 18427 - RNA, 21 nt, synthetic construct
  source 1..21: mol_type = other RNA
tctgggtttgagtccttggca

SEQ ID NO: 18428 - RNA, 21 nt, synthetic construct
  source 1..21: mol_type = other RNA
tctggtgcgtttcactgatcc

SEQ ID NO: 18429 - RNA, 21 nt, synthetic construct
  source 1..21: mol_type = other RNA
tctgtcccagcacagggtggc

SEQ ID NO: 18430 - RNA, 21 nt, synthetic construct
  source 1..21: mol_type = other RNA
tctgttcagccctaagaatcc

SEQ ID NO: 18431 - RNA, 21 nt, synthetic construct
  source 1..21: mol_type = other RNA
tctgttttcgtggctccctct

SEQ ID NO: 18432 - RNA, 21 nt, synthetic construct
  source 1..21: mol_type = other RNA
tcttaaacagccagtggccag

SEQ ID NO: 18433 - RNA, 21 nt, synthetic construct
  source 1..21: mol_type = other RNA
tcttagggaggcggggctggg

SEQ ID NO: 18434 - RNA, 21 nt, synthetic construct
  source 1..21: mol_type = other RNA
tcttagggctgaacagagaag

SEQ ID NO: 18435 - RNA, 21 nt, synthetic construct
  source 1..21: mol_type = other RNA
tcttagggtaccccacgtggg

SEQ ID NO: 18436 - RNA, 21 nt, synthetic construct
  source 1..21: mol_type = other RNA
tcttcacctttctagtcccca

SEQ ID NO: 18437 - RNA, 21 nt, synthetic construct
  source 1..21: mol_type = other RNA
tcttcagactgagccccgttc

SEQ ID NO: 18438 - RNA, 21 nt, synthetic construct
  source 1..21: mol_type = other RNA
tcttccctagtctgagcactg

SEQ ID NO: 18439 - RNA, 21 nt, synthetic construct
  source 1..21: mol_type = other RNA
tcttcccttaggggtccaaaa

SEQ ID NO: 18440 - RNA, 21 nt, synthetic construct
  source 1..21: mol_type = other RNA
tcttcggggtatcccaggagg

SEQ ID NO: 18441 - RNA, 21 nt, synthetic construct
  source 1..21: mol_type = other RNA
tcttctctgttcagccctaag

SEQ ID NO: 18442 - RNA, 21 nt, synthetic construct
  source 1..21: mol_type = other RNA
tcttgattcccggccagtttc

SEQ ID NO: 18443 - RNA, 21 nt, synthetic construct
  source 1..21: mol_type = other RNA
tcttggccacgtaacctgaga

SEQ ID NO: 18444 - RNA, 21 nt, synthetic construct
  source 1..21: mol_type = other RNA
tcttggccctcgtagctccct

SEQ ID NO: 18445 - RNA, 21 nt, synthetic construct
  source 1..21: mol_type = other RNA
tcttgggaagtgtaaggaagc

SEQ ID NO: 18446 - RNA, 21 nt, synthetic construct
  source 1..21: mol_type = other RNA
tctttaaggaaagaaggatgg

SEQ ID NO: 18447 - RNA, 21 nt, synthetic construct
  source 1..21: mol_type = other RNA
tctttcacagggatgcctgta

SEQ ID NO: 18448 - RNA, 21 nt, synthetic construct
  source 1..21: mol_type = other RNA
tctttccttaaagagtcccca

SEQ ID NO: 18449 - RNA, 21 nt, synthetic construct
  source 1..21: mol_type = other RNA
tctttctccatccttctttcc

SEQ ID NO: 18450 - RNA, 21 nt, synthetic construct
  source 1..21: mol_type = other RNA
tgaaaccctcagtcctaggaa

SEQ ID NO: 18451 - RNA, 21 nt, synthetic construct
  source 1..21: mol_type = other RNA
tgaaacgcaccagacggccgc

SEQ ID NO: 18452 - RNA, 21 nt, synthetic construct
  source 1..21: mol_type = other RNA
tgaaagatgcctgaggcctgg

SEQ ID NO: 18453 - RNA, 21 nt, synthetic construct
  source 1..21: mol_type = other RNA
tgaaagggaaaggcccattgc

SEQ ID NO: 18454 - RNA, 21 nt, synthetic construct
  source 1..21: mol_type = other RNA
tgaacacctaggacgcaccat

SEQ ID NO: 18455 - RNA, 21 nt, synthetic construct
  source 1..21: mol_type = other RNA
tgaacagagaagagctggggg

SEQ ID NO: 18456 - RNA, 21 nt, synthetic construct
  source 1..21: mol_type = other RNA
tgaaccccagcccaccccaat

SEQ ID NO: 18457 - RNA, 21 nt, synthetic construct
  source 1..21: mol_type = other RNA
tgaacggggaagggagggggc

SEQ ID NO: 18458 - RNA, 21 nt, synthetic construct
  source 1..21: mol_type = other RNA
tgaactcggctcgtttatttc

SEQ ID NO: 18459 - RNA, 21 nt, synthetic construct
  source 1..21: mol_type = other RNA
tgaactggagctgaggaagga

SEQ ID NO: 18460 - RNA, 21 nt, synthetic construct
  source 1..21: mol_type = other RNA
tgaactggagtgtgacagcct

SEQ ID NO: 18461 - RNA, 21 nt, synthetic construct
  source 1..21: mol_type = other RNA
tgaagagcagagccaggaacc

SEQ ID NO: 18462 - RNA, 21 nt, synthetic construct
  source 1..21: mol_type = other RNA
tgaagagccaaagttagaact

SEQ ID NO: 18463 - RNA, 21 nt, synthetic construct
  source 1..21: mol_type = other RNA
tgaagctaaactcctagatcc

SEQ ID NO: 18464 - RNA, 21 nt, synthetic construct
  source 1..21: mol_type = other RNA
tgaaggaggaggggctggaac

SEQ ID NO: 18465 - RNA, 21 nt, synthetic construct
  source 1..21: mol_type = other RNA
tgaaggagtccaggcccccag

SEQ ID NO: 18466 - RNA, 21 nt, synthetic construct
  source 1..21: mol_type = other RNA
tgaaggcctggccggcctgac

SEQ ID NO: 18467 - RNA, 21 nt, synthetic construct
  source 1..21: mol_type = other RNA
tgaaggggccgcacgtgccct

SEQ ID NO: 18468 - RNA, 21 nt, synthetic construct
  source 1..21: mol_type = other RNA
tgaatggggagaggctggggg

SEQ ID NO: 18469 - RNA, 21 nt, synthetic construct
  source 1..21: mol_type = other RNA
tgaatggggaggggttgggcc

SEQ ID NO: 18470 - RNA, 21 nt, synthetic construct
  source 1..21: mol_type = other RNA
tgacaactgggtggaaataaa

SEQ ID NO: 18471 - RNA, 21 nt, synthetic construct
  source 1..21: mol_type = other RNA
tgacacgggccaccgtttctc

SEQ ID NO: 18472 - RNA, 21 nt, synthetic construct
  source 1..21: mol_type = other RNA
tgacagcctggggcccaggca

SEQ ID NO: 18473 - RNA, 21 nt, synthetic construct
  source 1..21: mol_type = other RNA
tgaccaaccatccctgttttc

SEQ ID NO: 18474 - RNA, 21 nt, synthetic construct
  source 1..21: mol_type = other RNA
tgaccactgggcaaccaggcg

SEQ ID NO: 18475 - RNA, 21 nt, synthetic construct
  source 1..21: mol_type = other RNA
tgaccagcttatgctgtttgc

SEQ ID NO: 18476 - RNA, 21 nt, synthetic construct
  source 1..21: mol_type = other RNA
tgacccaaacccagctcccct

SEQ ID NO: 18477 - RNA, 21 nt, synthetic construct
  source 1..21: mol_type = other RNA
tgacccaacagcctctggcca

SEQ ID NO: 18478 - RNA, 21 nt, synthetic construct
  source 1..21: mol_type = other RNA
tgacccttggaaggacctggc

SEQ ID NO: 18479 - RNA, 21 nt, synthetic construct
  source 1..21: mol_type = other RNA
tgacctcatgctcttggccct

SEQ ID NO: 18480 - RNA, 21 nt, synthetic construct
  source 1..21: mol_type = other RNA
tgacctgcccggttctcagtg

SEQ ID NO: 18481 - RNA, 21 nt, synthetic construct
  source 1..21: mol_type = other RNA
tgacgcacggaggaacaatat

SEQ ID NO: 18482 - RNA, 21 nt, synthetic construct
  source 1..21: mol_type = other RNA
tgacgcggccgtctggtgcgt

SEQ ID NO: 18483 - RNA, 21 nt, synthetic construct
  source 1..21: mol_type = other RNA
tgacgggggttttgccgtgtc

SEQ ID NO: 18484 - RNA, 21 nt, synthetic construct
  source 1..21: mol_type = other RNA
tgactcttgattcccggccag

SEQ ID NO: 18485 - RNA, 21 nt, synthetic construct
  source 1..21: mol_type = other RNA
tgactgcttggcaaactcact

SEQ ID NO: 18486 - RNA, 21 nt, synthetic construct
  source 1..21: mol_type = other RNA
tgagaaacggtggcccgtgtc

SEQ ID NO: 18487 - RNA, 21 nt, synthetic construct
  source 1..21: mol_type = other RNA
tgagaaccgggcaggtcacgc

SEQ ID NO: 18488 - RNA, 21 nt, synthetic construct
  source 1..21: mol_type = other RNA
tgagaagccccctcccttccc

SEQ ID NO: 18489 - RNA, 21 nt, synthetic construct
  source 1..21: mol_type = other RNA
tgagaagggaatccctcctct

SEQ ID NO: 18490 - RNA, 21 nt, synthetic construct
  source 1..21: mol_type = other RNA
tgagaatggtgcgtcctaggt

SEQ ID NO: 18491 - RNA, 21 nt, synthetic construct
  source 1..21: mol_type = other RNA
tgagacagctgcacacctgtg

SEQ ID NO: 18492 - RNA, 21 nt, synthetic construct
  source 1..21: mol_type = other RNA
tgagataaggccagtagccag

SEQ ID NO: 18493 - RNA, 21 nt, synthetic construct
  source 1..21: mol_type = other RNA
tgagatggtggacgaggaagg

SEQ ID NO: 18494 - RNA, 21 nt, synthetic construct
  source 1..21: mol_type = other RNA
tgagcactgaaggcctggccg

SEQ ID NO: 18495 - RNA, 21 nt, synthetic construct
  source 1..21: mol_type = other RNA
tgagcactggaagcgccacct

SEQ ID NO: 18496 - RNA, 21 nt, synthetic construct
  source 1..21: mol_type = other RNA
tgagccccgttcccctgcatc

SEQ ID NO: 18497 - RNA, 21 nt, synthetic construct
  source 1..21: mol_type = other RNA
tgagcgcctctcctgggcttg

SEQ ID NO: 18498 - RNA, 21 nt, synthetic construct
  source 1..21: mol_type = other RNA
tgagctgctctgacgcggccg

SEQ ID NO: 18499 - RNA, 21 nt, synthetic construct
  source 1..21: mol_type = other RNA
tgaggaaggagtgaagctaaa

SEQ ID NO: 18500 - RNA, 21 nt, synthetic construct
  source 1..21: mol_type = other RNA
tgaggaggggggtgtccgtgt

SEQ ID NO: 18501 - RNA, 21 nt, synthetic construct
  source 1..21: mol_type = other RNA
tgaggccccctctgcacgggg

SEQ ID NO: 18502 - RNA, 21 nt, synthetic construct
  source 1..21: mol_type = other RNA
tgaggcctgggcaccagggac

SEQ ID NO: 18503 - RNA, 21 nt, synthetic construct
  source 1..21: mol_type = other RNA
tgaggctggtaccctgccccc

SEQ ID NO: 18504 - RNA, 21 nt, synthetic construct
  source 1..21: mol_type = other RNA
tgagggacttggggggtaatt

SEQ ID NO: 18505 - RNA, 21 nt, synthetic construct
  source 1..21: mol_type = other RNA
tgagggcggaagggctggggc

SEQ ID NO: 18506 - RNA, 21 nt, synthetic construct
  source 1..21: mol_type = other RNA
tgagggtggagggactggggg

SEQ ID NO: 18507 - RNA, 21 nt, synthetic construct
  source 1..21: mol_type = other RNA
tgagggtttcagtgctaaaac

SEQ ID NO: 18508 - RNA, 21 nt, synthetic construct
  source 1..21: mol_type = other RNA
tgaggtcatggaaactcgggc

SEQ ID NO: 18509 - RNA, 21 nt, synthetic construct
  source 1..21: mol_type = other RNA
tgagtccttggcaagcccagg

SEQ ID NO: 18510 - RNA, 21 nt, synthetic construct
  source 1..21: mol_type = other RNA
tgagtctgtcccagcacaggg

SEQ ID NO: 18511 - RNA, 21 nt, synthetic construct
  source 1..21: mol_type = other RNA
tgagttctaactttggctctt

SEQ ID NO: 18512 - RNA, 21 nt, synthetic construct
  source 1..21: mol_type = other RNA
tgagtttgccaagcagtcacc

SEQ ID NO: 18513 - RNA, 21 nt, synthetic construct
  source 1..21: mol_type = other RNA
tgataaacccacgtggggtac

SEQ ID NO: 18514 - RNA, 21 nt, synthetic construct
  source 1..21: mol_type = other RNA
tgatcctggtgctgcagcttc

SEQ ID NO: 18515 - RNA, 21 nt, synthetic construct
  source 1..21: mol_type = other RNA
tgattcccggccagtttctcc

SEQ ID NO: 18516 - RNA, 21 nt, synthetic construct
  source 1..21: mol_type = other RNA
tgattttgtttttccaaactg

SEQ ID NO: 18517 - RNA, 21 nt, synthetic construct
  source 1..21: mol_type = other RNA
tgcaaacaggaagtgaacggg

SEQ ID NO: 18518 - RNA, 21 nt, synthetic construct
  source 1..21: mol_type = other RNA
tgcacacctgtgtgcctgggc

SEQ ID NO: 18519 - RNA, 21 nt, synthetic construct
  source 1..21: mol_type = other RNA
tgcaccccaattgccttagtg

SEQ ID NO: 18520 - RNA, 21 nt, synthetic construct
  source 1..21: mol_type = other RNA
tgcacggggccctgcagccag

SEQ ID NO: 18521 - RNA, 21 nt, synthetic construct
  source 1..21: mol_type = other RNA
tgcagagggggcctcagtgaa

SEQ ID NO: 18522 - RNA, 21 nt, synthetic construct
  source 1..21: mol_type = other RNA
tgcagagtatctgctggggtg

SEQ ID NO: 18523 - RNA, 21 nt, synthetic construct
  source 1..21: mol_type = other RNA
tgcagatagccaggagtcctt

SEQ ID NO: 18524 - RNA, 21 nt, synthetic construct
  source 1..21: mol_type = other RNA
tgcagcaccaggatcagtgaa

SEQ ID NO: 18525 - RNA, 21 nt, synthetic construct
  source 1..21: mol_type = other RNA
tgcagccaggggctgacacgg

SEQ ID NO: 18526 - RNA, 21 nt, synthetic construct
  source 1..21: mol_type = other RNA
tgcagctgtctcacccctctg

SEQ ID NO: 18527 - RNA, 21 nt, synthetic construct
  source 1..21: mol_type = other RNA
tgcagcttccttacacttccc

SEQ ID NO: 18528 - RNA, 21 nt, synthetic construct
  source 1..21: mol_type = other RNA
tgcaggaacgaagccgtgggc

SEQ ID NO: 18529 - RNA, 21 nt, synthetic construct
  source 1..21: mol_type = other RNA
tgcaggaatgggggcagggta

SEQ ID NO: 18530 - RNA, 21 nt, synthetic construct
  source 1..21: mol_type = other RNA
tgcaggacgagaaacacagcc

SEQ ID NO: 18531 - RNA, 21 nt, synthetic construct
  source 1..21: mol_type = other RNA
tgcagggccccgtgcagaggg

SEQ ID NO: 18532 - RNA, 21 nt, synthetic construct
  source 1..21: mol_type = other RNA
tgcaggggaacggggatgcag

SEQ ID NO: 18533 - RNA, 21 nt, synthetic construct
  source 1..21: mol_type = other RNA
tgcaggggaacggggctcagt

SEQ ID NO: 18534 - RNA, 21 nt, synthetic construct
  source 1..21: mol_type = other RNA
tgcaggggaagggggatgcag

SEQ ID NO: 18535 - RNA, 21 nt, synthetic construct
  source 1..21: mol_type = other RNA
tgcagggtggaggaaggccac

SEQ ID NO: 18536 - RNA, 21 nt, synthetic construct
  source 1..21: mol_type = other RNA
tgcatagccctgggcccacgg

SEQ ID NO: 18537 - RNA, 21 nt, synthetic construct
  source 1..21: mol_type = other RNA
tgcatcccccagaggccccag

SEQ ID NO: 18538 - RNA, 21 nt, synthetic construct
  source 1..21: mol_type = other RNA
tgcatcccccttcccctgcat

SEQ ID NO: 18539 - RNA, 21 nt, synthetic construct
  source 1..21: mol_type = other RNA
tgcatccccgttcccctgcat

SEQ ID NO: 18540 - RNA, 21 nt, synthetic construct
  source 1..21: mol_type = other RNA
tgcatccttctccaggcaggt

SEQ ID NO: 18541 - RNA, 21 nt, synthetic construct
  source 1..21: mol_type = other RNA
tgccaagcagtcaccccacag

SEQ ID NO: 18542 - RNA, 21 nt, synthetic construct
  source 1..21: mol_type = other RNA
tgccaaggactcaaacccaga

SEQ ID NO: 18543 - RNA, 21 nt, synthetic construct
  source 1..21: mol_type = other RNA
tgccaggacggggctggctac

SEQ ID NO: 18544 - RNA, 21 nt, synthetic construct
  source 1..21: mol_type = other RNA
tgcccaggacagcctagtttt

SEQ ID NO: 18545 - RNA, 21 nt, synthetic construct
  source 1..21: mol_type = other RNA
tgcccaggcctcaggcatctt

SEQ ID NO: 18546 - RNA, 21 nt, synthetic construct
  source 1..21: mol_type = other RNA
tgcccagtacaggcatccctg

SEQ ID NO: 18547 - RNA, 21 nt, synthetic construct
  source 1..21: mol_type = other RNA
tgcccagtggtcaggccggcc

SEQ ID NO: 18548 - RNA, 21 nt, synthetic construct
  source 1..21: mol_type = other RNA
tgcccatctggaggaggcggg

SEQ ID NO: 18549 - RNA, 21 nt, synthetic construct
  source 1..21: mol_type = other RNA
tgccccaggccttgtggacac

SEQ ID NO: 18550 - RNA, 21 nt, synthetic construct
  source 1..21: mol_type = other RNA
tgcccccattcctgcacccca

SEQ ID NO: 18551 - RNA, 21 nt, synthetic construct
  source 1..21: mol_type = other RNA
tgcccccctcccctatcgcca

SEQ ID NO: 18552 - RNA, 21 nt, synthetic construct
  source 1..21: mol_type = other RNA
tgcccctggctctcctgcccc

SEQ ID NO: 18553 - RNA, 21 nt, synthetic construct
  source 1..21: mol_type = other RNA
tgccccttccctacaggggtt

SEQ ID NO: 18554 - RNA, 21 nt, synthetic construct
  source 1..21: mol_type = other RNA
tgcccggttctcagtggccac

SEQ ID NO: 18555 - RNA, 21 nt, synthetic construct
  source 1..21: mol_type = other RNA
tgccctgggaacgggatgaac

SEQ ID NO: 18556 - RNA, 21 nt, synthetic construct
  source 1..21: mol_type = other RNA
tgccgtgtctaacaggtacca

SEQ ID NO: 18557 - RNA, 21 nt, synthetic construct
  source 1..21: mol_type = other RNA
tgcctgaggcctgggcaccag

SEQ ID NO: 18558 - RNA, 21 nt, synthetic construct
  source 1..21: mol_type = other RNA
tgcctggagaaggatgcagga

SEQ ID NO: 18559 - RNA, 21 nt, synthetic construct
  source 1..21: mol_type = other RNA
tgcctgggccccaggctgtca

SEQ ID NO: 18560 - RNA, 21 nt, synthetic construct
  source 1..21: mol_type = other RNA
tgcctgtactgggcaggtcct

SEQ ID NO: 18561 - RNA, 21 nt, synthetic construct
  source 1..21: mol_type = other RNA
tgccttaaacccagccaggtc

SEQ ID NO: 18562 - RNA, 21 nt, synthetic construct
  source 1..21: mol_type = other RNA
tgccttagtggctagggggtt

SEQ ID NO: 18563 - RNA, 21 nt, synthetic construct
  source 1..21: mol_type = other RNA
tgccttttgggtggattctcc

SEQ ID NO: 18564 - RNA, 21 nt, synthetic construct
  source 1..21: mol_type = other RNA
tgcgctaccctctcccagaac

SEQ ID NO: 18565 - RNA, 21 nt, synthetic construct
  source 1..21: mol_type = other RNA
tgcggccccttcacagcccga

SEQ ID NO: 18566 - RNA, 21 nt, synthetic construct
  source 1..21: mol_type = other RNA
tgcgggaaccccacatggtac

SEQ ID NO: 18567 - RNA, 21 nt, synthetic construct
  source 1..21: mol_type = other RNA
tgcgtcagttttacctgtgag

SEQ ID NO: 18568 - RNA, 21 nt, synthetic construct
  source 1..21: mol_type = other RNA
tgcgtcctaggtgttcaccag

SEQ ID NO: 18569 - RNA, 21 nt, synthetic construct
  source 1..21: mol_type = other RNA
tgcgtgacctgcccggttctc

SEQ ID NO: 18570 - RNA, 21 nt, synthetic construct
  source 1..21: mol_type = other RNA
tgcgtttcactgatcctggtg

SEQ ID NO: 18571 - RNA, 21 nt, synthetic construct
  source 1..21: mol_type = other RNA
tgctaaaactaggctgtcctg

SEQ ID NO: 18572 - RNA, 21 nt, synthetic construct
  source 1..21: mol_type = other RNA
tgctaggacagtggggaaaat

SEQ ID NO: 18573 - RNA, 21 nt, synthetic construct
  source 1..21: mol_type = other RNA
tgctatctgggacatattcct

SEQ ID NO: 18574 - RNA, 21 nt, synthetic construct
  source 1..21: mol_type = other RNA
tgctcagactagggaagaggt

SEQ ID NO: 18575 - RNA, 21 nt, synthetic construct
  source 1..21: mol_type = other RNA
tgctcagtggaaaccacgaaa

SEQ ID NO: 18576 - RNA, 21 nt, synthetic construct
  source 1..21: mol_type = other RNA
tgctccaggcctcctgggata

SEQ ID NO: 18577 - RNA, 21 nt, synthetic construct
  source 1..21: mol_type = other RNA
tgctctccttgcccccctccc

SEQ ID NO: 18578 - RNA, 21 nt, synthetic construct
  source 1..21: mol_type = other RNA
tgctctgacgcggccgtctgg

SEQ ID NO: 18579 - RNA, 21 nt, synthetic construct
  source 1..21: mol_type = other RNA
tgctctgggcggaggaatatg

SEQ ID NO: 18580 - RNA, 21 nt, synthetic construct
  source 1..21: mol_type = other RNA
tgctctgggcttctgggtttg

SEQ ID NO: 18581 - RNA, 21 nt, synthetic construct
  source 1..21: mol_type = other RNA
tgctcttcagactgagccccg

SEQ ID NO: 18582 - RNA, 21 nt, synthetic construct
  source 1..21: mol_type = other RNA
tgctcttggccctcgtagctc

SEQ ID NO: 18583 - RNA, 21 nt, synthetic construct
  source 1..21: mol_type = other RNA
tgctgcagcttccttacactt

SEQ ID NO: 18584 - RNA, 21 nt, synthetic construct
  source 1..21: mol_type = other RNA
tgctgggacagactcaggggc

SEQ ID NO: 18585 - RNA, 21 nt, synthetic construct
  source 1..21: mol_type = other RNA
tgctggggtggtttccgagct

SEQ ID NO: 18586 - RNA, 21 nt, synthetic construct
  source 1..21: mol_type = other RNA
tgctgtggctgttcccaagtt

SEQ ID NO: 18587 - RNA, 21 nt, synthetic construct
  source 1..21: mol_type = other RNA
tgctgtttgcccaggacagcc

SEQ ID NO: 18588 - RNA, 21 nt, synthetic construct
  source 1..21: mol_type = other RNA
tgcttctcctcttgggaagtg

SEQ ID NO: 18589 - RNA, 21 nt, synthetic construct
  source 1..21: mol_type = other RNA
tgcttcttggccacgtaacct

SEQ ID NO: 18590 - RNA, 21 nt, synthetic construct
  source 1..21: mol_type = other RNA
tgcttggcaaactcactcttc

SEQ ID NO: 18591 - RNA, 21 nt, synthetic construct
  source 1..21: mol_type = other RNA
tgcttggggacctgcctggag

SEQ ID NO: 18592 - RNA, 21 nt, synthetic construct
  source 1..21: mol_type = other RNA
tggaaaaacaaaatcagaata

SEQ ID NO: 18593 - RNA, 21 nt, synthetic construct
  source 1..21: mol_type = other RNA
tggaaaactccctttgtgaga

SEQ ID NO: 18594 - RNA, 21 nt, synthetic construct
  source 1..21: mol_type = other RNA
tggaaaccacgaaaggactcc

SEQ ID NO: 18595 - RNA, 21 nt, synthetic construct
  source 1..21: mol_type = other RNA
tggaaactcgggctgtgaagg

SEQ ID NO: 18596 - RNA, 21 nt, synthetic construct
  source 1..21: mol_type = other RNA
tggaaataaacgagccgagtt

SEQ ID NO: 18597 - RNA, 21 nt, synthetic construct
  source 1..21: mol_type = other RNA
tggaacctcttccctagtctg

SEQ ID NO: 18598 - RNA, 21 nt, synthetic construct
  source 1..21: mol_type = other RNA
tggaagcgccacctgtgggtg

SEQ ID NO: 18599 - RNA, 21 nt, synthetic construct
  source 1..21: mol_type = other RNA
tggaaggacctggctgggttt

SEQ ID NO: 18600 - RNA, 21 nt, synthetic construct
  source 1..21: mol_type = other RNA
tggacactgggtgggctccgg

SEQ ID NO: 18601 - RNA, 21 nt, synthetic construct
  source 1..21: mol_type = other RNA
tggaccccacgagaggccacc

SEQ ID NO: 18602 - RNA, 21 nt, synthetic construct
  source 1..21: mol_type = other RNA
tggacccctaagggaagaatg

SEQ ID NO: 18603 - RNA, 21 nt, synthetic construct
  source 1..21: mol_type = other RNA
tggacccctgggtctgaatgg

SEQ ID NO: 18604 - RNA, 21 nt, synthetic construct
  source 1..21: mol_type = other RNA
tggacgaggaagggggacagg

SEQ ID NO: 18605 - RNA, 21 nt, synthetic construct
  source 1..21: mol_type = other RNA
tggactcctgggtctgagggt

SEQ ID NO: 18606 - RNA, 21 nt, synthetic construct
  source 1..21: mol_type = other RNA
tggactccttcatctgagggc

SEQ ID NO: 18607 - RNA, 21 nt, synthetic construct
  source 1..21: mol_type = other RNA
tggactctggagtccctggtg

SEQ ID NO: 18608 - RNA, 21 nt, synthetic construct
  source 1..21: mol_type = other RNA
tggacttcggcttttgtcccc

SEQ ID NO: 18609 - RNA, 21 nt, synthetic construct
  source 1..21: mol_type = other RNA
tggacttctgggtcttaggga

SEQ ID NO: 18610 - RNA, 21 nt, synthetic construct
  source 1..21: mol_type = other RNA
tggagaaactggccgggaatc

SEQ ID NO: 18611 - RNA, 21 nt, synthetic construct
  source 1..21: mol_type = other RNA
tggagaaagagaaagggagta

SEQ ID NO: 18612 - RNA, 21 nt, synthetic construct
  source 1..21: mol_type = other RNA
tggagaaggatgcaggacgag

SEQ ID NO: 18613 - RNA, 21 nt, synthetic construct
  source 1..21: mol_type = other RNA
tggagaggtgagggacttggg

SEQ ID NO: 18614 - RNA, 21 nt, synthetic construct
  source 1..21: mol_type = other RNA
tggagcattggggtgggctgg

SEQ ID NO: 18615 - RNA, 21 nt, synthetic construct
  source 1..21: mol_type = other RNA
tggagccaggattcttagggc

SEQ ID NO: 18616 - RNA, 21 nt, synthetic construct
  source 1..21: mol_type = other RNA
tggagctgaggaaggagtgaa

SEQ ID NO: 18617 - RNA, 21 nt, synthetic construct
  source 1..21: mol_type = other RNA
tggaggaaggccaccctgtgc

SEQ ID NO: 18618 - RNA, 21 nt, synthetic construct
  source 1..21: mol_type = other RNA
tggaggagaatccacccaaaa

SEQ ID NO: 18619 - RNA, 21 nt, synthetic construct
  source 1..21: mol_type = other RNA
tggaggaggcgggagggagct

SEQ ID NO: 18620 - RNA, 21 nt, synthetic construct
  source 1..21: mol_type = other RNA
tggagggactgggggcctgga

SEQ ID NO: 18621 - RNA, 21 nt, synthetic construct
  source 1..21: mol_type = other RNA
tggagtcccgacttgctggga

SEQ ID NO: 18622 - RNA, 21 nt, synthetic construct
  source 1..21: mol_type = other RNA
tggagtccctggtgcccaggc

SEQ ID NO: 18623 - RNA, 21 nt, synthetic construct
  source 1..21: mol_type = other RNA
tggagtgtgacagcctggggc

SEQ ID NO: 18624 - RNA, 21 nt, synthetic construct
  source 1..21: mol_type = other RNA
tggatctaggagtttagcttc

SEQ ID NO: 18625 - RNA, 21 nt, synthetic construct
  source 1..21: mol_type = other RNA
tggatctgttttcgtggctcc

SEQ ID NO: 18626 - RNA, 21 nt, synthetic construct
  source 1..21: mol_type = other RNA
tggattctcctccaactgtgg

SEQ ID NO: 18627 - RNA, 21 nt, synthetic construct
  source 1..21: mol_type = other RNA
tggcaaactcactcttcgggg

SEQ ID NO: 18628 - RNA, 21 nt, synthetic construct
  source 1..21: mol_type = other RNA
tggcaagcccaggagaggcgc

SEQ ID NO: 18629 - RNA, 21 nt, synthetic construct
  source 1..21: mol_type = other RNA
tggcagggctgtggtgaggag

SEQ ID NO: 18630 - RNA, 21 nt, synthetic construct
  source 1..21: mol_type = other RNA
tggccaagaagcaggggagct

SEQ ID NO: 18631 - RNA, 21 nt, synthetic construct
  source 1..21: mol_type = other RNA
tggccaccctgcgctaccctc

SEQ ID NO: 18632 - RNA, 21 nt, synthetic construct
  source 1..21: mol_type = other RNA
tggccacgtaacctgagaagg

SEQ ID NO: 18633 - RNA, 21 nt, synthetic construct
  source 1..21: mol_type = other RNA
tggccactgagaaccgggcag

SEQ ID NO: 18634 - RNA, 21 nt, synthetic construct
  source 1..21: mol_type = other RNA
tggccactggctgtttaagat

SEQ ID NO: 18635 - RNA, 21 nt, synthetic construct
  source 1..21: mol_type = other RNA
tggccagaggctgttgggtca

SEQ ID NO: 18636 - RNA, 21 nt, synthetic construct
  source 1..21: mol_type = other RNA
tggcccccagcccctcctgcc

SEQ ID NO: 18637 - RNA, 21 nt, synthetic construct
  source 1..21: mol_type = other RNA
tggcccgtgtcagcccctggc

SEQ ID NO: 18638 - RNA, 21 nt, synthetic construct
  source 1..21: mol_type = other RNA
tggccctcgtagctccctccc

SEQ ID NO: 18639 - RNA, 21 nt, synthetic construct
  source 1..21: mol_type = other RNA
tggccgcctctactccctttc

SEQ ID NO: 18640 - RNA, 21 nt, synthetic construct
  source 1..21: mol_type = other RNA
tggccggcctgaccactgggc

SEQ ID NO: 18641 - RNA, 21 nt, synthetic construct
  source 1..21: mol_type = other RNA
tggccgggaatcaagagtcac

SEQ ID NO: 18642 - RNA, 21 nt, synthetic construct
  source 1..21: mol_type = other RNA
tggcctcctgggttgaatggg

SEQ ID NO: 18643 - RNA, 21 nt, synthetic construct
  source 1..21: mol_type = other RNA
tggcctctcgtggggtccagg

SEQ ID NO: 18644 - RNA, 21 nt, synthetic construct
  source 1..21: mol_type = other RNA
tggcctggaccccacgagagg

SEQ ID NO: 18645 - RNA, 21 nt, synthetic construct
  source 1..21: mol_type = other RNA
tggcctggggcctctggggga

SEQ ID NO: 18646 - RNA, 21 nt, synthetic construct
  source 1..21: mol_type = other RNA
tggccttatctcacaggtaaa

SEQ ID NO: 18647 - RNA, 21 nt, synthetic construct
  source 1..21: mol_type = other RNA
tggccttcctccaccctgcat

SEQ ID NO: 18648 - RNA, 21 nt, synthetic construct
  source 1..21: mol_type = other RNA
tggcgataggggaggggggca

SEQ ID NO: 18649 - RNA, 21 nt, synthetic construct
  source 1..21: mol_type = other RNA
tggcgcttccagtgctcagac

SEQ ID NO: 18650 - RNA, 21 nt, synthetic construct
  source 1..21: mol_type = other RNA
tggctactggccttatctcac

SEQ ID NO: 18651 - RNA, 21 nt, synthetic construct
  source 1..21: mol_type = other RNA
tggctagggggttgggggcta

SEQ ID NO: 18652 - RNA, 21 nt, synthetic construct
  source 1..21: mol_type = other RNA
tggctatctgcaaacaggaag

SEQ ID NO: 18653 - RNA, 21 nt, synthetic construct
  source 1..21: mol_type = other RNA
tggctccagcccctcctactc

SEQ ID NO: 18654 - RNA, 21 nt, synthetic construct
  source 1..21: mol_type = other RNA
tggctccctctggagtcccga

SEQ ID NO: 18655 - RNA, 21 nt, synthetic construct
  source 1..21: mol_type = other RNA
tggctctcctgccccttccct

SEQ ID NO: 18656 - RNA, 21 nt, synthetic construct
  source 1..21: mol_type = other RNA
tggctctgaaggaggaggggc

SEQ ID NO: 18657 - RNA, 21 nt, synthetic construct
  source 1..21: mol_type = other RNA
tggctctgctcttcagactga

SEQ ID NO: 18658 - RNA, 21 nt, synthetic construct
  source 1..21: mol_type = other RNA
tggctcttcacctttctagtc

SEQ ID NO: 18659 - RNA, 21 nt, synthetic construct
  source 1..21: mol_type = other RNA
tggctgcagggccccgtgcag

SEQ ID NO: 18660 - RNA, 21 nt, synthetic construct
  source 1..21: mol_type = other RNA
tggctgggtttaaggcaggag

SEQ ID NO: 18661 - RNA, 21 nt, synthetic construct
  source 1..21: mol_type = other RNA
tggctgttcccaagttcttag

SEQ ID NO: 18662 - RNA, 21 nt, synthetic construct
  source 1..21: mol_type = other RNA
tggctgtttaagatacgcctg

SEQ ID NO: 18663 - RNA, 21 nt, synthetic construct
  source 1..21: mol_type = other RNA
tgggaacagccacagcagggg

SEQ ID NO: 18664 - RNA, 21 nt, synthetic construct
  source 1..21: mol_type = other RNA
tgggaacgggatgaactcggc

SEQ ID NO: 18665 - RNA, 21 nt, synthetic construct
  source 1..21: mol_type = other RNA
tgggaagtgtaaggaagctgc

SEQ ID NO: 18666 - RNA, 21 nt, synthetic construct
  source 1..21: mol_type = other RNA
tgggacagactcaggggcctg

SEQ ID NO: 18667 - RNA, 21 nt, synthetic construct
  source 1..21: mol_type = other RNA
tgggacatattcctccgccca

SEQ ID NO: 18668 - RNA, 21 nt, synthetic construct
  source 1..21: mol_type = other RNA
tgggagagggtagcgcagggt

SEQ ID NO: 18669 - RNA, 21 nt, synthetic construct
  source 1..21: mol_type = other RNA
tgggagtcccgcccaggcccc

SEQ ID NO: 18670 - RNA, 21 nt, synthetic construct
  source 1..21: mol_type = other RNA
tgggataccccgaagagtgag

SEQ ID NO: 18671 - RNA, 21 nt, synthetic construct
  source 1..21: mol_type = other RNA
tgggcaaacagcataagctgg

SEQ ID NO: 18672 - RNA, 21 nt, synthetic construct
  source 1..21: mol_type = other RNA
tgggcaaccaggcgtatctta

SEQ ID NO: 18673 - RNA, 21 nt, synthetic construct
  source 1..21: mol_type = other RNA
tgggcaccagggactccagag

SEQ ID NO: 18674 - RNA, 21 nt, synthetic construct
  source 1..21: mol_type = other RNA
tgggcagctttggagaggtga

SEQ ID NO: 18675 - RNA, 21 nt, synthetic construct
  source 1..21: mol_type = other RNA
tgggcaggtccttgaaaggga

SEQ ID NO: 18676 - RNA, 21 nt, synthetic construct
  source 1..21: mol_type = other RNA
tgggcccacggcttcgttcct

SEQ ID NO: 18677 - RNA, 21 nt, synthetic construct
  source 1..21: mol_type = other RNA
tgggcccagggctatgcaggg

SEQ ID NO: 18678 - RNA, 21 nt, synthetic construct
  source 1..21: mol_type = other RNA
tgggccccaggctgtcacact

SEQ ID NO: 18679 - RNA, 21 nt, synthetic construct
  source 1..21: mol_type = other RNA
tgggcctggacccctgggtct

SEQ ID NO: 18680 - RNA, 21 nt, synthetic construct
  source 1..21: mol_type = other RNA
tgggcctggactctggagtcc

SEQ ID NO: 18681 - RNA, 21 nt, synthetic construct
  source 1..21: mol_type = other RNA
tgggcctttccctttcaagga

SEQ ID NO: 18682 - RNA, 21 nt, synthetic construct
  source 1..21: mol_type = other RNA
tgggcggaggaatatgtccca

SEQ ID NO: 18683 - RNA, 21 nt, synthetic construct
  source 1..21: mol_type = other RNA
tgggcgggactcccagagggg

SEQ ID NO: 18684 - RNA, 21 nt, synthetic construct
  source 1..21: mol_type = other RNA
tgggctccgggacctgaactg

SEQ ID NO: 18685 - RNA, 21 nt, synthetic construct
  source 1..21: mol_type = other RNA
tgggctcctgggtttgagaga

SEQ ID NO: 18686 - RNA, 21 nt, synthetic construct
  source 1..21: mol_type = other RNA
tgggctggggttcagagagga

SEQ ID NO: 18687 - RNA, 21 nt, synthetic construct
  source 1..21: mol_type = other RNA
tgggcttctgggtttgagtcc

SEQ ID NO: 18688 - RNA, 21 nt, synthetic construct
  source 1..21: mol_type = other RNA
tgggcttgccaaggactcaaa

SEQ ID NO: 18689 - RNA, 21 nt, synthetic construct
  source 1..21: mol_type = other RNA
tggggaaaatgacccaacagc

SEQ ID NO: 18690 - RNA, 21 nt, synthetic construct
  source 1..21: mol_type = other RNA
tggggacctgcctggagaagg

SEQ ID NO: 18691 - RNA, 21 nt, synthetic construct
  source 1..21: mol_type = other RNA
tggggactagaaaggtgaaga

SEQ ID NO: 18692 - RNA, 21 nt, synthetic construct
  source 1..21: mol_type = other RNA
tggggactctttaaggaaaga

SEQ ID NO: 18693 - RNA, 21 nt, synthetic construct
  source 1..21: mol_type = other RNA
tggggagaggctgggggcctg

SEQ ID NO: 18694 - RNA, 21 nt, synthetic construct
  source 1..21: mol_type = other RNA
tggggaggggttgggcctgga

SEQ ID NO: 18695 - RNA, 21 nt, synthetic construct
  source 1..21: mol_type = other RNA
tggggcaagtccctcctccga

SEQ ID NO: 18696 - RNA, 21 nt, synthetic construct
  source 1..21: mol_type = other RNA
tggggcccaggcacacaggtg

SEQ ID NO: 18697 - RNA, 21 nt, synthetic construct
  source 1..21: mol_type = other RNA
tggggcctctgggggatgcag

SEQ ID NO: 18698 - RNA, 21 nt, synthetic construct
  source 1..21: mol_type = other RNA
tggggcctggactcctgggtc

SEQ ID NO: 18699 - RNA, 21 nt, synthetic construct
  source 1..21: mol_type = other RNA
tggggcctggcctcctgggtt

SEQ ID NO: 18700 - RNA, 21 nt, synthetic construct
  source 1..21: mol_type = other RNA
tggggctgtgtttctcgtcct

SEQ ID NO: 18701 - RNA, 21 nt, synthetic construct
  source 1..21: mol_type = other RNA
tgggggatgcaggggaagggg

SEQ ID NO: 18702 - RNA, 21 nt, synthetic construct
  source 1..21: mol_type = other RNA
tgggggcagggtaccagcctc

SEQ ID NO: 18703 - RNA, 21 nt, synthetic construct
  source 1..21: mol_type = other RNA
tgggggccaggactcctggct

SEQ ID NO: 18704 - RNA, 21 nt, synthetic construct
  source 1..21: mol_type = other RNA
tgggggcctggactccttcat

SEQ ID NO: 18705 - RNA, 21 nt, synthetic construct
  source 1..21: mol_type = other RNA
tgggggcctggacttctgggt

SEQ ID NO: 18706 - RNA, 21 nt, synthetic construct
  source 1..21: mol_type = other RNA
tgggggcctgggctcctgggt

SEQ ID NO: 18707 - RNA, 21 nt, synthetic construct
  source 1..21: mol_type = other RNA
tgggggctagagtaggagggg

SEQ ID NO: 18708 - RNA, 21 nt, synthetic construct
  source 1..21: mol_type = other RNA
tggggggacaaaagccgaagt

SEQ ID NO: 18709 - RNA, 21 nt, synthetic construct
  source 1..21: mol_type = other RNA
tggggggtaatttatcccgtg

SEQ ID NO: 18710 - RNA, 21 nt, synthetic construct
  source 1..21: mol_type = other RNA
tggggtaccctaagaacttgg

SEQ ID NO: 18711 - RNA, 21 nt, synthetic construct
  source 1..21: mol_type = other RNA
tggggtccaggccaagtaggt

SEQ ID NO: 18712 - RNA, 21 nt, synthetic construct
  source 1..21: mol_type = other RNA
tggggtgaccagcttatgctg

SEQ ID NO: 18713 - RNA, 21 nt, synthetic construct
  source 1..21: mol_type = other RNA
tggggtgactgcttggcaaac

SEQ ID NO: 18714 - RNA, 21 nt, synthetic construct
  source 1..21: mol_type = other RNA
tggggtgcaggaatgggggca

SEQ ID NO: 18715 - RNA, 21 nt, synthetic construct
  source 1..21: mol_type = other RNA
tggggtggcctctcgtggggt

SEQ ID NO: 18716 - RNA, 21 nt, synthetic construct
  source 1..21: mol_type = other RNA
tggggtgggctggggttcaga

SEQ ID NO: 18717 - RNA, 21 nt, synthetic construct
  source 1..21: mol_type = other RNA
tggggtggtttccgagcttga

SEQ ID NO: 18718 - RNA, 21 nt, synthetic construct
  source 1..21: mol_type = other RNA
tggggttcagagaggagggat

SEQ ID NO: 18719 - RNA, 21 nt, synthetic construct
  source 1..21: mol_type = other RNA
tggggttcccgcacccagatg

SEQ ID NO: 18720 - RNA, 21 nt, synthetic construct
  source 1..21: mol_type = other RNA
tgggtcaggtctgggtgtggg

SEQ ID NO: 18721 - RNA, 21 nt, synthetic construct
  source 1..21: mol_type = other RNA
tgggtcattttccccactgtc

SEQ ID NO: 18722 - RNA, 21 nt, synthetic construct
  source 1..21: mol_type = other RNA
tgggtctgaatggggagaggc

SEQ ID NO: 18723 - RNA, 21 nt, synthetic construct
  source 1..21: mol_type = other RNA
tgggtctgagggtggagggac

SEQ ID NO: 18724 - RNA, 21 nt, synthetic construct
  source 1..21: mol_type = other RNA
tgggtcttagggaggcggggc

SEQ ID NO: 18725 - RNA, 21 nt, synthetic construct
  source 1..21: mol_type = other RNA
tgggtgactcttgattcccgg

SEQ ID NO: 18726 - RNA, 21 nt, synthetic construct
  source 1..21: mol_type = other RNA
tgggtgcgggaaccccacatg

SEQ ID NO: 18727 - RNA, 21 nt, synthetic construct
  source 1..21: mol_type = other RNA
tgggtggaaataaacgagccg

SEQ ID NO: 18728 - RNA, 21 nt, synthetic construct
  source 1..21: mol_type = other RNA
tgggtggattctcctccaact

SEQ ID NO: 18729 - RNA, 21 nt, synthetic construct
  source 1..21: mol_type = other RNA
tgggtgggctccgggacctga

SEQ ID NO: 18730 - RNA, 21 nt, synthetic construct
  source 1..21: mol_type = other RNA
tgggtggtgacgggggttttg

SEQ ID NO: 18731 - RNA, 21 nt, synthetic construct
  source 1..21: mol_type = other RNA
tgggtgtggggtgaccagctt

SEQ ID NO: 18732 - RNA, 21 nt, synthetic construct
  source 1..21: mol_type = other RNA
tgggttgaatggggaggggtt

SEQ ID NO: 18733 - RNA, 21 nt, synthetic construct
  source 1..21: mol_type = other RNA
tgggtttaaggcaggaggggc

SEQ ID NO: 18734 - RNA, 21 nt, synthetic construct
  source 1..21: mol_type = other RNA
tgggtttatcaaccacttggt

SEQ ID NO: 18735 - RNA, 21 nt, synthetic construct
  source 1..21: mol_type = other RNA
tgggtttgagagaggaggggc

SEQ ID NO: 18736 - RNA, 21 nt, synthetic construct
  source 1..21: mol_type = other RNA
tgggtttgagtccttggcaag

SEQ ID NO: 18737 - RNA, 21 nt, synthetic construct
  source 1..21: mol_type = other RNA
tgggtttgggtcaggtctggg

SEQ ID NO: 18738 - RNA, 21 nt, synthetic construct
  source 1..21: mol_type = other RNA
tggtaccctgcccccattcct

SEQ ID NO: 18739 - RNA, 21 nt, synthetic construct
  source 1..21: mol_type = other RNA
tggtacctgttagacacggca

SEQ ID NO: 18740 - RNA, 21 nt, synthetic construct
  source 1..21: mol_type = other RNA
tggtagacagggctggggtgg

SEQ ID NO: 18741 - RNA, 21 nt, synthetic construct
  source 1..21: mol_type = other RNA
tggtcaccccacacccagacc

SEQ ID NO: 18742 - RNA, 21 nt, synthetic construct
  source 1..21: mol_type = other RNA
tggtcactgtctctgggtgac

SEQ ID NO: 18743 - RNA, 21 nt, synthetic construct
  source 1..21: mol_type = other RNA
tggtcaggccggccaggcctt

SEQ ID NO: 18744 - RNA, 21 nt, synthetic construct
  source 1..21: mol_type = other RNA
tggtcctgagttctaactttg

SEQ ID NO: 18745 - RNA, 21 nt, synthetic construct
  source 1..21: mol_type = other RNA
tggtgaacacctaggacgcac

SEQ ID NO: 18746 - RNA, 21 nt, synthetic construct
  source 1..21: mol_type = other RNA
tggtgacgggggttttgccgt

SEQ ID NO: 18747 - RNA, 21 nt, synthetic construct
  source 1..21: mol_type = other RNA
tggtgaggaggggggtgtccg

SEQ ID NO: 18748 - RNA, 21 nt, synthetic construct
  source 1..21: mol_type = other RNA
tggtgaggctggtaccctgcc

SEQ ID NO: 18749 - RNA, 21 nt, synthetic construct
  source 1..21: mol_type = other RNA
tggtgcccaggcctcaggcat

SEQ ID NO: 18750 - RNA, 21 nt, synthetic construct
  source 1..21: mol_type = other RNA
tggtgcgtcctaggtgttcac

SEQ ID NO: 18751 - RNA, 21 nt, synthetic construct
  source 1..21: mol_type = other RNA
tggtgcgtttcactgatcctg

SEQ ID NO: 18752 - RNA, 21 nt, synthetic construct
  source 1..21: mol_type = other RNA
tggtgctgcagcttccttaca

SEQ ID NO: 18753 - RNA, 21 nt, synthetic construct
  source 1..21: mol_type = other RNA
tggtggacgaggaagggggac

SEQ ID NO: 18754 - RNA, 21 nt, synthetic construct
  source 1..21: mol_type = other RNA
tggttgataaacccacgtggg

SEQ ID NO: 18755 - RNA, 21 nt, synthetic construct
  source 1..21: mol_type = other RNA
tggttgcccagtggtcaggcc

SEQ ID NO: 18756 - RNA, 21 nt, synthetic construct
  source 1..21: mol_type = other RNA
tggttggtcactgtctctggg

SEQ ID NO: 18757 - RNA, 21 nt, synthetic construct
  source 1..21: mol_type = other RNA
tggtttccactgagcactgaa

SEQ ID NO: 18758 - RNA, 21 nt, synthetic construct
  source 1..21: mol_type = other RNA
tggtttccgagcttgaccctt

SEQ ID NO: 18759 - RNA, 21 nt, synthetic construct
  source 1..21: mol_type = other RNA
tgtaaggaagctgcagcacca

SEQ ID NO: 18760 - RNA, 21 nt, synthetic construct
  source 1..21: mol_type = other RNA
tgtactgggcaggtccttgaa

SEQ ID NO: 18761 - RNA, 21 nt, synthetic construct
  source 1..21: mol_type = other RNA
tgtagggaaggggcaggagag

SEQ ID NO: 18762 - RNA, 21 nt, synthetic construct
  source 1..21: mol_type = other RNA
tgtcacactccagttcactga

SEQ ID NO: 18763 - RNA, 21 nt, synthetic construct
  source 1..21: mol_type = other RNA
tgtcagcccctggctgcaggg

SEQ ID NO: 18764 - RNA, 21 nt, synthetic construct
  source 1..21: mol_type = other RNA
tgtcatggcgataggggaggg

SEQ ID NO: 18765 - RNA, 21 nt, synthetic construct
  source 1..21: mol_type = other RNA
tgtccacaaggcctggggcaa

SEQ ID NO: 18766 - RNA, 21 nt, synthetic construct
  source 1..21: mol_type = other RNA
tgtcccagatagcactgggga

SEQ ID NO: 18767 - RNA, 21 nt, synthetic construct
  source 1..21: mol_type = other RNA
tgtcccagcaagtcgggactc

SEQ ID NO: 18768 - RNA, 21 nt, synthetic construct
  source 1..21: mol_type = other RNA
tgtcccagcacagggtggcct

SEQ ID NO: 18769 - RNA, 21 nt, synthetic construct
  source 1..21: mol_type = other RNA
tgtccccccaagttttggacc

SEQ ID NO: 18770 - RNA, 21 nt, synthetic construct
  source 1..21: mol_type = other RNA
tgtcccccttcctcgtccacc

SEQ ID NO: 18771 - RNA, 21 nt, synthetic construct
  source 1..21: mol_type = other RNA
tgtccctggatctgttttcgt

SEQ ID NO: 18772 - RNA, 21 nt, synthetic construct
  source 1..21: mol_type = other RNA
tgtccgtgtggaaaactccct

SEQ ID NO: 18773 - RNA, 21 nt, synthetic construct
  source 1..21: mol_type = other RNA
tgtcctagcaccgtgtccctg

SEQ ID NO: 18774 - RNA, 21 nt, synthetic construct
  source 1..21: mol_type = other RNA
tgtcctgggcaaacagcataa

SEQ ID NO: 18775 - RNA, 21 nt, synthetic construct
  source 1..21: mol_type = other RNA
tgtctaacaggtaccatgtgg

SEQ ID NO: 18776 - RNA, 21 nt, synthetic construct
  source 1..21: mol_type = other RNA
tgtctaccaggctgccttttg

SEQ ID NO: 18777 - RNA, 21 nt, synthetic construct
  source 1..21: mol_type = other RNA
tgtctcacccctctgggagtc

SEQ ID NO: 18778 - RNA, 21 nt, synthetic construct
  source 1..21: mol_type = other RNA
tgtctctgggtgactcttgat

SEQ ID NO: 18779 - RNA, 21 nt, synthetic construct
  source 1..21: mol_type = other RNA
tgtgaaagatgcctgaggcct

SEQ ID NO: 18780 - RNA, 21 nt, synthetic construct
  source 1..21: mol_type = other RNA
tgtgaaggggccgcacgtgcc

SEQ ID NO: 18781 - RNA, 21 nt, synthetic construct
  source 1..21: mol_type = other RNA
tgtgacagcctggggcccagg

SEQ ID NO: 18782 - RNA, 21 nt, synthetic construct
  source 1..21: mol_type = other RNA
tgtgagaatggtgcgtcctag

SEQ ID NO: 18783 - RNA, 21 nt, synthetic construct
  source 1..21: mol_type = other RNA
tgtgagataaggccagtagcc

SEQ ID NO: 18784 - RNA, 21 nt, synthetic construct
  source 1..21: mol_type = other RNA
tgtgcagctgtctcacccctc

SEQ ID NO: 18785 - RNA, 21 nt, synthetic construct
  source 1..21: mol_type = other RNA
tgtgcctgggccccaggctgt

SEQ ID NO: 18786 - RNA, 21 nt, synthetic construct
  source 1..21: mol_type = other RNA
tgtgctgggacagactcaggg

SEQ ID NO: 18787 - RNA, 21 nt, synthetic construct
  source 1..21: mol_type = other RNA
tgtggaaaactccctttgtga

SEQ ID NO: 18788 - RNA, 21 nt, synthetic construct
  source 1..21: mol_type = other RNA
tgtggacactgggtgggctcc

SEQ ID NO: 18789 - RNA, 21 nt, synthetic construct
  source 1..21: mol_type = other RNA
tgtggctgttcccaagttctt

SEQ ID NO: 18790 - RNA, 21 nt, synthetic construct
  source 1..21: mol_type = other RNA
tgtggggtgaccagcttatgc

SEQ ID NO: 18791 - RNA, 21 nt, synthetic construct
  source 1..21: mol_type = other RNA
tgtggggtgactgcttggcaa

SEQ ID NO: 18792 - RNA, 21 nt, synthetic construct
  source 1..21: mol_type = other RNA
tgtggggttcccgcacccaga

SEQ ID NO: 18793 - RNA, 21 nt, synthetic construct
  source 1..21: mol_type = other RNA
tgtgggtggtgacgggggttt

SEQ ID NO: 18794 - RNA, 21 nt, synthetic construct
  source 1..21: mol_type = other RNA
tgtggtgaggaggggggtgtc

SEQ ID NO: 18795 - RNA, 21 nt, synthetic construct
  source 1..21: mol_type = other RNA
tgtgtgcctgggccccaggct

SEQ ID NO: 18796 - RNA, 21 nt, synthetic construct
  source 1..21: mol_type = other RNA
tgtgtttctcgtcctgcatcc

SEQ ID NO: 18797 - RNA, 21 nt, synthetic construct
  source 1..21: mol_type = other RNA
tgttagacacggcaaaacccc

SEQ ID NO: 18798 - RNA, 21 nt, synthetic construct
  source 1..21: mol_type = other RNA
tgttcaccaggtcgtggccgc

SEQ ID NO: 18799 - RNA, 21 nt, synthetic construct
  source 1..21: mol_type = other RNA
tgttcagccctaagaatcctg

SEQ ID NO: 18800 - RNA, 21 nt, synthetic construct
  source 1..21: mol_type = other RNA
tgttcccaagttcttagggta

SEQ ID NO: 18801 - RNA, 21 nt, synthetic construct
  source 1..21: mol_type = other RNA
tgttcctccgtgcgtcagttt

SEQ ID NO: 18802 - RNA, 21 nt, synthetic construct
  source 1..21: mol_type = other RNA
tgttgggtcattttccccact

SEQ ID NO: 18803 - RNA, 21 nt, synthetic construct
  source 1..21: mol_type = other RNA
tgtttaagatacgcctggttg

SEQ ID NO: 18804 - RNA, 21 nt, synthetic construct
  source 1..21: mol_type = other RNA
tgtttctcgtcctgcatcctt

SEQ ID NO: 18805 - RNA, 21 nt, synthetic construct
  source 1..21: mol_type = other RNA
tgtttgcagatagccaggagt

SEQ ID NO: 18806 - RNA, 21 nt, synthetic construct
  source 1..21: mol_type = other RNA
tgtttgcccaggacagcctag

SEQ ID NO: 18807 - RNA, 21 nt, synthetic construct
  source 1..21: mol_type = other RNA
tgttttcctaggactgagggt

SEQ ID NO: 18808 - RNA, 21 nt, synthetic construct
  source 1..21: mol_type = other RNA
tgttttcgtggctccctctgg

SEQ ID NO: 18809 - RNA, 21 nt, synthetic construct
  source 1..21: mol_type = other RNA
tgtttttccaaactgcttctc

SEQ ID NO: 18810 - RNA, 21 nt, synthetic construct
  source 1..21: mol_type = other RNA
ttaaacagccagtggccagag

SEQ ID NO: 18811 - RNA, 21 nt, synthetic construct
  source 1..21: mol_type = other RNA
ttaaacccagccaggtccttc

SEQ ID NO: 18812 - RNA, 21 nt, synthetic construct
  source 1..21: mol_type = other RNA
ttaaagagtccccagtgctat

SEQ ID NO: 18813 - RNA, 21 nt, synthetic construct
  source 1..21: mol_type = other RNA
ttaagatacgcctggttgccc

SEQ ID NO: 18814 - RNA, 21 nt, synthetic construct
  source 1..21: mol_type = other RNA
ttaaggaaagaaggatggaga

SEQ ID NO: 18815 - RNA, 21 nt, synthetic construct
  source 1..21: mol_type = other RNA
ttaaggcaggaggggctgggg

SEQ ID NO: 18816 - RNA, 21 nt, synthetic construct
  source 1..21: mol_type = other RNA
ttacacttcccaagaggagaa

SEQ ID NO: 18817 - RNA, 21 nt, synthetic construct
  source 1..21: mol_type = other RNA
ttaccccccaagtccctcacc

SEQ ID NO: 18818 - RNA, 21 nt, synthetic construct
  source 1..21: mol_type = other RNA
ttacctgtgagataaggccag

SEQ ID NO: 18819 - RNA, 21 nt, synthetic construct
  source 1..21: mol_type = other RNA
ttacgtggccaagaagcaggg

SEQ ID NO: 18820 - RNA, 21 nt, synthetic construct
  source 1..21: mol_type = other RNA
ttagaactcaggaccaactta

SEQ ID NO: 18821 - RNA, 21 nt, synthetic construct
  source 1..21: mol_type = other RNA
ttagacacggcaaaacccccg

SEQ ID NO: 18822 - RNA, 21 nt, synthetic construct
  source 1..21: mol_type = other RNA
ttagcactgaaaccctcagtc

SEQ ID NO: 18823 - RNA, 21 nt, synthetic construct
  source 1..21: mol_type = other RNA
ttagcttcactccttcctcag

SEQ ID NO: 18824 - RNA, 21 nt, synthetic construct
  source 1..21: mol_type = other RNA
ttagggaagcgggaccctgct

SEQ ID NO: 18825 - RNA, 21 nt, synthetic construct
  source 1..21: mol_type = other RNA
ttagggaggcggggctgggcc

SEQ ID NO: 18826 - RNA, 21 nt, synthetic construct
  source 1..21: mol_type = other RNA
ttagggctgaacagagaagag

SEQ ID NO: 18827 - RNA, 21 nt, synthetic construct
  source 1..21: mol_type = other RNA
ttaggggtccaaaacttgggg

SEQ ID NO: 18828 - RNA, 21 nt, synthetic construct
  source 1..21: mol_type = other RNA
ttagggtaccccacgtgggtt

SEQ ID NO: 18829 - RNA, 21 nt, synthetic construct
  source 1..21: mol_type = other RNA
ttagtggctagggggttgggg

SEQ ID NO: 18830 - RNA, 21 nt, synthetic construct
  source 1..21: mol_type = other RNA
ttatattgttcctccgtgcgt

SEQ ID NO: 18831 - RNA, 21 nt, synthetic construct
  source 1..21: mol_type = other RNA
ttatcaaccacttggtgaggc

SEQ ID NO: 18832 - RNA, 21 nt, synthetic construct
  source 1..21: mol_type = other RNA
ttatcccgtggatctaggagt

SEQ ID NO: 18833 - RNA, 21 nt, synthetic construct
  source 1..21: mol_type = other RNA
ttatctcacaggtaaaactga

SEQ ID NO: 18834 - RNA, 21 nt, synthetic construct
  source 1..21: mol_type = other RNA
ttatgctgtttgcccaggaca

SEQ ID NO: 18835 - RNA, 21 nt, synthetic construct
  source 1..21: mol_type = other RNA
ttattctgattttgtttttcc

SEQ ID NO: 18836 - RNA, 21 nt, synthetic construct
  source 1..21: mol_type = other RNA
ttatttccacccagttgtcat

SEQ ID NO: 18837 - RNA, 21 nt, synthetic construct
  source 1..21: mol_type = other RNA
ttcaacccaggaggccaggcc

SEQ ID NO: 18838 - RNA, 21 nt, synthetic construct
  source 1..21: mol_type = other RNA
ttcaaggacctgcccagtaca

SEQ ID NO: 18839 - RNA, 21 nt, synthetic construct
  source 1..21: mol_type = other RNA
ttcacagcccgagtttccatg

SEQ ID NO: 18840 - RNA, 21 nt, synthetic construct
  source 1..21: mol_type = other RNA
ttcacagggatgcctgtactg

SEQ ID NO: 18841 - RNA, 21 nt, synthetic construct
  source 1..21: mol_type = other RNA
ttcaccaggtcgtggccgcct

SEQ ID NO: 18842 - RNA, 21 nt, synthetic construct
  source 1..21: mol_type = other RNA
ttcacctttctagtccccaat

SEQ ID NO: 18843 - RNA, 21 nt, synthetic construct
  source 1..21: mol_type = other RNA
ttcactccttcctcagctcca

SEQ ID NO: 18844 - RNA, 21 nt, synthetic construct
  source 1..21: mol_type = other RNA
ttcactgaggccccctctgca

SEQ ID NO: 18845 - RNA, 21 nt, synthetic construct
  source 1..21: mol_type = other RNA
ttcactgatcctggtgctgca

SEQ ID NO: 18846 - RNA, 21 nt, synthetic construct
  source 1..21: mol_type = other RNA
ttcacttcctgtttgcagata

SEQ ID NO: 18847 - RNA, 21 nt, synthetic construct
  source 1..21: mol_type = other RNA
ttcagacccaggggtccaggc

SEQ ID NO: 18848 - RNA, 21 nt, synthetic construct
  source 1..21: mol_type = other RNA
ttcagactgagccccgttccc

SEQ ID NO: 18849 - RNA, 21 nt, synthetic construct
  source 1..21: mol_type = other RNA
ttcagagaggagggattccct

SEQ ID NO: 18850 - RNA, 21 nt, synthetic construct
  source 1..21: mol_type = other RNA
ttcagagccaggagtcctggc

SEQ ID NO: 18851 - RNA, 21 nt, synthetic construct
  source 1..21: mol_type = other RNA
ttcagccctaagaatcctggc

SEQ ID NO: 18852 - RNA, 21 nt, synthetic construct
  source 1..21: mol_type = other RNA
ttcaggtcccggagcccaccc

SEQ ID NO: 18853 - RNA, 21 nt, synthetic construct
  source 1..21: mol_type = other RNA
ttcagtgctaaaactaggctg

SEQ ID NO: 18854 - RNA, 21 nt, synthetic construct
  source 1..21: mol_type = other RNA
ttcagtgctcagtggaaacca

SEQ ID NO: 18855 - RNA, 21 nt, synthetic construct
  source 1..21: mol_type = other RNA
ttcatcccgttcccagggcac

SEQ ID NO: 18856 - RNA, 21 nt, synthetic construct
  source 1..21: mol_type = other RNA
ttcatctgagggcggaagggc

SEQ ID NO: 18857 - RNA, 21 nt, synthetic construct
  source 1..21: mol_type = other RNA
ttccaaactgcttctcctctt

SEQ ID NO: 18858 - RNA, 21 nt, synthetic construct
  source 1..21: mol_type = other RNA
ttccaagggtcaagctcggaa

SEQ ID NO: 18859 - RNA, 21 nt, synthetic construct
  source 1..21: mol_type = other RNA
ttccacacggacacccccctc

SEQ ID NO: 18860 - RNA, 21 nt, synthetic construct
  source 1..21: mol_type = other RNA
ttccacccagttgtcatggcg

SEQ ID NO: 18861 - RNA, 21 nt, synthetic construct
  source 1..21: mol_type = other RNA
ttccactgagcactgaaggcc

SEQ ID NO: 18862 - RNA, 21 nt, synthetic construct
  source 1..21: mol_type = other RNA
ttccagcccctcctccttcag

SEQ ID NO: 18863 - RNA, 21 nt, synthetic construct
  source 1..21: mol_type = other RNA
ttccagtgctcagactaggga

SEQ ID NO: 18864 - RNA, 21 nt, synthetic construct
  source 1..21: mol_type = other RNA
ttccatgacctcatgctcttg

SEQ ID NO: 18865 - RNA, 21 nt, synthetic construct
  source 1..21: mol_type = other RNA
ttcccaagaggagaagcagtt

SEQ ID NO: 18866 - RNA, 21 nt, synthetic construct
  source 1..21: mol_type = other RNA
ttcccaagttcttagggtacc

SEQ ID NO: 18867 - RNA, 21 nt, synthetic construct
  source 1..21: mol_type = other RNA
ttcccagggcacgtgcggccc

SEQ ID NO: 18868 - RNA, 21 nt, synthetic construct
  source 1..21: mol_type = other RNA
ttccccactgtcctagcaccg

SEQ ID NO: 18869 - RNA, 21 nt, synthetic construct
  source 1..21: mol_type = other RNA
ttccccgttcacttcctgttt

SEQ ID NO: 18870 - RNA, 21 nt, synthetic construct
  source 1..21: mol_type = other RNA
ttcccctgcatcccccagagg

SEQ ID NO: 18871 - RNA, 21 nt, synthetic construct
  source 1..21: mol_type = other RNA
ttcccctgcatcccccttccc

SEQ ID NO: 18872 - RNA, 21 nt, synthetic construct
  source 1..21: mol_type = other RNA
ttcccctgcatccccgttccc

SEQ ID NO: 18873 - RNA, 21 nt, synthetic construct
  source 1..21: mol_type = other RNA
ttcccgcacccagatgagaag

SEQ ID NO: 18874 - RNA, 21 nt, synthetic construct
  source 1..21: mol_type = other RNA
ttcccggccagtttctccacc

SEQ ID NO: 18875 - RNA, 21 nt, synthetic construct
  source 1..21: mol_type = other RNA
ttccctaaggccctgctctgg

SEQ ID NO: 18876 - RNA, 21 nt, synthetic construct
  source 1..21: mol_type = other RNA
ttccctacaggggttcctggc

SEQ ID NO: 18877 - RNA, 21 nt, synthetic construct
  source 1..21: mol_type = other RNA
ttccctagtctgagcactgga

SEQ ID NO: 18878 - RNA, 21 nt, synthetic construct
  source 1..21: mol_type = other RNA
ttccctgtcccccttcctcgt

SEQ ID NO: 18879 - RNA, 21 nt, synthetic construct
  source 1..21: mol_type = other RNA
ttcccttaggggtccaaaact

SEQ ID NO: 18880 - RNA, 21 nt, synthetic construct
  source 1..21: mol_type = other RNA
ttcccttctcaggttacgtgg

SEQ ID NO: 18881 - RNA, 21 nt, synthetic construct
  source 1..21: mol_type = other RNA
ttccctttcaaggacctgccc

SEQ ID NO: 18882 - RNA, 21 nt, synthetic construct
  source 1..21: mol_type = other RNA
ttccgagcttgacccttggaa

SEQ ID NO: 18883 - RNA, 21 nt, synthetic construct
  source 1..21: mol_type = other RNA
ttccgccctcagatgaaggag

SEQ ID NO: 18884 - RNA, 21 nt, synthetic construct
  source 1..21: mol_type = other RNA
ttcctaggactgagggtttca

SEQ ID NO: 18885 - RNA, 21 nt, synthetic construct
  source 1..21: mol_type = other RNA
ttcctcagctccagttcaggt

SEQ ID NO: 18886 - RNA, 21 nt, synthetic construct
  source 1..21: mol_type = other RNA
ttcctccaccctgcatagccc

SEQ ID NO: 18887 - RNA, 21 nt, synthetic construct
  source 1..21: mol_type = other RNA
ttcctccgcccagagcagggt

SEQ ID NO: 18888 - RNA, 21 nt, synthetic construct
  source 1..21: mol_type = other RNA
ttcctccgtgcgtcagtttta

SEQ ID NO: 18889 - RNA, 21 nt, synthetic construct
  source 1..21: mol_type = other RNA
ttcctcgtccaccatctcatg

SEQ ID NO: 18890 - RNA, 21 nt, synthetic construct
  source 1..21: mol_type = other RNA
ttcctgcaccccaattgcctt

SEQ ID NO: 18891 - RNA, 21 nt, synthetic construct
  source 1..21: mol_type = other RNA
ttcctgcagagtatctgctgg

SEQ ID NO: 18892 - RNA, 21 nt, synthetic construct
  source 1..21: mol_type = other RNA
ttcctggctctgctcttcaga

SEQ ID NO: 18893 - RNA, 21 nt, synthetic construct
  source 1..21: mol_type = other RNA
ttcctgtttgcagatagccag

SEQ ID NO: 18894 - RNA, 21 nt, synthetic construct
  source 1..21: mol_type = other RNA
ttccttaaagagtccccagtg

SEQ ID NO: 18895 - RNA, 21 nt, synthetic construct
  source 1..21: mol_type = other RNA
ttccttacacttcccaagagg

SEQ ID NO: 18896 - RNA, 21 nt, synthetic construct
  source 1..21: mol_type = other RNA
ttcggcttttgtccccccaag

SEQ ID NO: 18897 - RNA, 21 nt, synthetic construct
  source 1..21: mol_type = other RNA
ttcggggtatcccaggaggcc

SEQ ID NO: 18898 - RNA, 21 nt, synthetic construct
  source 1..21: mol_type = other RNA
ttcgtggctccctctggagtc

SEQ ID NO: 18899 - RNA, 21 nt, synthetic construct
  source 1..21: mol_type = other RNA
ttcgtggtttccactgagcac

SEQ ID NO: 18900 - RNA, 21 nt, synthetic construct
  source 1..21: mol_type = other RNA
ttcgttcctgcagagtatctg

SEQ ID NO: 18901 - RNA, 21 nt, synthetic construct
  source 1..21: mol_type = other RNA
ttctaactttggctcttcacc

SEQ ID NO: 18902 - RNA, 21 nt, synthetic construct
  source 1..21: mol_type = other RNA
ttctagtccccaatttatatt

SEQ ID NO: 18903 - RNA, 21 nt, synthetic construct
  source 1..21: mol_type = other RNA
ttctcacaaagggagttttcc

SEQ ID NO: 18904 - RNA, 21 nt, synthetic construct
  source 1..21: mol_type = other RNA
ttctcaggttacgtggccaag

SEQ ID NO: 18905 - RNA, 21 nt, synthetic construct
  source 1..21: mol_type = other RNA
ttctcagtggccaccctgcgc

SEQ ID NO: 18906 - RNA, 21 nt, synthetic construct
  source 1..21: mol_type = other RNA
ttctcatctgggtgcgggaac

SEQ ID NO: 18907 - RNA, 21 nt, synthetic construct
  source 1..21: mol_type = other RNA
ttctcattcttcccttagggg

SEQ ID NO: 18908 - RNA, 21 nt, synthetic construct
  source 1..21: mol_type = other RNA
ttctccacctggggctgtgtt

SEQ ID NO: 18909 - RNA, 21 nt, synthetic construct
  source 1..21: mol_type = other RNA
ttctccaggcaggtccccaag

SEQ ID NO: 18910 - RNA, 21 nt, synthetic construct
  source 1..21: mol_type = other RNA
ttctccatccttctttcctta

SEQ ID NO: 18911 - RNA, 21 nt, synthetic construct
  source 1..21: mol_type = other RNA
ttctcctccaactgtggggtg

SEQ ID NO: 18912 - RNA, 21 nt, synthetic construct
  source 1..21: mol_type = other RNA
ttctcctcttgggaagtgtaa

SEQ ID NO: 18913 - RNA, 21 nt, synthetic construct
  source 1..21: mol_type = other RNA
ttctcgtcctgcatccttctc

SEQ ID NO: 18914 - RNA, 21 nt, synthetic construct
  source 1..21: mol_type = other RNA
ttctctgttcagccctaagaa

SEQ ID NO: 18915 - RNA, 21 nt, synthetic construct
  source 1..21: mol_type = other RNA
ttctctttctccatccttctt

SEQ ID NO: 18916 - RNA, 21 nt, synthetic construct
  source 1..21: mol_type = other RNA
ttctgattttgtttttccaaa

SEQ ID NO: 18917 - RNA, 21 nt, synthetic construct
  source 1..21: mol_type = other RNA
ttctgggagagggtagcgcag

SEQ ID NO: 18918 - RNA, 21 nt, synthetic construct
  source 1..21: mol_type = other RNA
ttctgggtcttagggaggcgg

SEQ ID NO: 18919 - RNA, 21 nt, synthetic construct
  source 1..21: mol_type = other RNA
ttctgggtttgagtccttggc

SEQ ID NO: 18920 - RNA, 21 nt, synthetic construct
  source 1..21: mol_type = other RNA
ttcttagggctgaacagagaa

SEQ ID NO: 18921 - RNA, 21 nt, synthetic construct
  source 1..21: mol_type = other RNA
ttcttagggtaccccacgtgg

SEQ ID NO: 18922 - RNA, 21 nt, synthetic construct
  source 1..21: mol_type = other RNA
ttcttcccttaggggtccaaa

SEQ ID NO: 18923 - RNA, 21 nt, synthetic construct
  source 1..21: mol_type = other RNA
ttcttggccacgtaacctgag

SEQ ID NO: 18924 - RNA, 21 nt, synthetic construct
  source 1..21: mol_type = other RNA
ttctttccttaaagagtcccc

SEQ ID NO: 18925 - RNA, 21 nt, synthetic construct
  source 1..21: mol_type = other RNA
ttgaaagggaaaggcccattg

SEQ ID NO: 18926 - RNA, 21 nt, synthetic construct
  source 1..21: mol_type = other RNA
ttgaatggggaggggttgggc

SEQ ID NO: 18927 - RNA, 21 nt, synthetic construct
  source 1..21: mol_type = other RNA
ttgacccttggaaggacctgg

SEQ ID NO: 18928 - RNA, 21 nt, synthetic construct
  source 1..21: mol_type = other RNA
ttgagagaggaggggctgggg

SEQ ID NO: 18929 - RNA, 21 nt, synthetic construct
  source 1..21: mol_type = other RNA
ttgagtccttggcaagcccag

SEQ ID NO: 18930 - RNA, 21 nt, synthetic construct
  source 1..21: mol_type = other RNA
ttgataaacccacgtggggta

SEQ ID NO: 18931 - RNA, 21 nt, synthetic construct
  source 1..21: mol_type = other RNA
ttgattcccggccagtttctc

SEQ ID NO: 18932 - RNA, 21 nt, synthetic construct
  source 1..21: mol_type = other RNA
ttgcagatagccaggagtcct

SEQ ID NO: 18933 - RNA, 21 nt, synthetic construct
  source 1..21: mol_type = other RNA
ttgccaagcagtcaccccaca

SEQ ID NO: 18934 - RNA, 21 nt, synthetic construct
  source 1..21: mol_type = other RNA
ttgccaaggactcaaacccag

SEQ ID NO: 18935 - RNA, 21 nt, synthetic construct
  source 1..21: mol_type = other RNA
ttgcccaggacagcctagttt

SEQ ID NO: 18936 - RNA, 21 nt, synthetic construct
  source 1..21: mol_type = other RNA
ttgcccagtggtcaggccggc

SEQ ID NO: 18937 - RNA, 21 nt, synthetic construct
  source 1..21: mol_type = other RNA
ttgccccaggccttgtggaca

SEQ ID NO: 18938 - RNA, 21 nt, synthetic construct
  source 1..21: mol_type = other RNA
ttgcccccctcccctatcgcc

SEQ ID NO: 18939 - RNA, 21 nt, synthetic construct
  source 1..21: mol_type = other RNA
ttgccgtgtctaacaggtacc

SEQ ID NO: 18940 - RNA, 21 nt, synthetic construct
  source 1..21: mol_type = other RNA
ttgccttagtggctagggggt

SEQ ID NO: 18941 - RNA, 21 nt, synthetic construct
  source 1..21: mol_type = other RNA
ttgctctccttgcccccctcc

SEQ ID NO: 18942 - RNA, 21 nt, synthetic construct
  source 1..21: mol_type = other RNA
ttggaaaaacaaaatcagaat

SEQ ID NO: 18943 - RNA, 21 nt, synthetic construct
  source 1..21: mol_type = other RNA
ttggaaggacctggctgggtt

SEQ ID NO: 18944 - RNA, 21 nt, synthetic construct
  source 1..21: mol_type = other RNA
ttggacccctaagggaagaat

SEQ ID NO: 18945 - RNA, 21 nt, synthetic construct
  source 1..21: mol_type = other RNA
ttggagaggtgagggacttgg

SEQ ID NO: 18946 - RNA, 21 nt, synthetic construct
  source 1..21: mol_type = other RNA
ttggaggagaatccacccaaa

SEQ ID NO: 18947 - RNA, 21 nt, synthetic construct
  source 1..21: mol_type = other RNA
ttggcaaactcactcttcggg

SEQ ID NO: 18948 - RNA, 21 nt, synthetic construct
  source 1..21: mol_type = other RNA
ttggcaagcccaggagaggcg

SEQ ID NO: 18949 - RNA, 21 nt, synthetic construct
  source 1..21: mol_type = other RNA
ttggccacgtaacctgagaag

SEQ ID NO: 18950 - RNA, 21 nt, synthetic construct
  source 1..21: mol_type = other RNA
ttggccctcgtagctccctcc

SEQ ID NO: 18951 - RNA, 21 nt, synthetic construct
  source 1..21: mol_type = other RNA
ttggcctggaccccacgagag

SEQ ID NO: 18952 - RNA, 21 nt, synthetic construct
  source 1..21: mol_type = other RNA
ttggctcttcacctttctagt

SEQ ID NO: 18953 - RNA, 21 nt, synthetic construct
  source 1..21: mol_type = other RNA
ttgggaacagccacagcaggg

SEQ ID NO: 18954 - RNA, 21 nt, synthetic construct
  source 1..21: mol_type = other RNA
ttgggaagtgtaaggaagctg

SEQ ID NO: 18955 - RNA, 21 nt, synthetic construct
  source 1..21: mol_type = other RNA
ttgggcctggactctggagtc

SEQ ID NO: 18956 - RNA, 21 nt, synthetic construct
  source 1..21: mol_type = other RNA
ttggggacctgcctggagaag

SEQ ID NO: 18957 - RNA, 21 nt, synthetic construct
  source 1..21: mol_type = other RNA
ttggggactagaaaggtgaag

SEQ ID NO: 18958 - RNA, 21 nt, synthetic construct
  source 1..21: mol_type = other RNA
ttgggggctagagtaggaggg

SEQ ID NO: 18959 - RNA, 21 nt, synthetic construct
  source 1..21: mol_type = other RNA
ttggggggacaaaagccgaag

SEQ ID NO: 18960 - RNA, 21 nt, synthetic construct
  source 1..21: mol_type = other RNA
ttggggggtaatttatcccgt

SEQ ID NO: 18961 - RNA, 21 nt, synthetic construct
  source 1..21: mol_type = other RNA
ttggggtgcaggaatgggggc

SEQ ID NO: 18962 - RNA, 21 nt, synthetic construct
  source 1..21: mol_type = other RNA
ttggggtgggctggggttcag

SEQ ID NO: 18963 - RNA, 21 nt, synthetic construct
  source 1..21: mol_type = other RNA
ttgggtcaggtctgggtgtgg

SEQ ID NO: 18964 - RNA, 21 nt, synthetic construct
  source 1..21: mol_type = other RNA
ttgggtcattttccccactgt

SEQ ID NO: 18965 - RNA, 21 nt, synthetic construct
  source 1..21: mol_type = other RNA
ttgggtggattctcctccaac

SEQ ID NO: 18966 - RNA, 21 nt, synthetic construct
  source 1..21: mol_type = other RNA
ttggtcactgtctctgggtga

SEQ ID NO: 18967 - RNA, 21 nt, synthetic construct
  source 1..21: mol_type = other RNA
ttggtcctgagttctaacttt

SEQ ID NO: 18968 - RNA, 21 nt, synthetic construct
  source 1..21: mol_type = other RNA
ttggtgaggctggtaccctgc

SEQ ID NO: 18969 - RNA, 21 nt, synthetic construct
  source 1..21: mol_type = other RNA
ttgtcatggcgataggggagg

SEQ ID NO: 18970 - RNA, 21 nt, synthetic construct
  source 1..21: mol_type = other RNA
ttgtccccccaagttttggac

SEQ ID NO: 18971 - RNA, 21 nt, synthetic construct
  source 1..21: mol_type = other RNA
ttgtgagaatggtgcgtccta

SEQ ID NO: 18972 - RNA, 21 nt, synthetic construct
  source 1..21: mol_type = other RNA
ttgtggacactgggtgggctc

SEQ ID NO: 18973 - RNA, 21 nt, synthetic construct
  source 1..21: mol_type = other RNA
ttgttcctccgtgcgtcagtt

SEQ ID NO: 18974 - RNA, 21 nt, synthetic construct
  source 1..21: mol_type = other RNA
ttgtttttccaaactgcttct

SEQ ID NO: 18975 - RNA, 21 nt, synthetic construct
  source 1..21: mol_type = other RNA
tttaagatacgcctggttgcc

SEQ ID NO: 18976 - RNA, 21 nt, synthetic construct
  source 1..21: mol_type = other RNA
tttaaggaaagaaggatggag

SEQ ID NO: 18977 - RNA, 21 nt, synthetic construct
  source 1..21: mol_type = other RNA
tttaaggcaggaggggctggg

SEQ ID NO: 18978 - RNA, 21 nt, synthetic construct
  source 1..21: mol_type = other RNA
tttacctgtgagataaggcca

SEQ ID NO: 18979 - RNA, 21 nt, synthetic construct
  source 1..21: mol_type = other RNA
tttagcactgaaaccctcagt

SEQ ID NO: 18980 - RNA, 21 nt, synthetic construct
  source 1..21: mol_type = other RNA
tttagcttcactccttcctca

SEQ ID NO: 18981 - RNA, 21 nt, synthetic construct
  source 1..21: mol_type = other RNA
tttatattgttcctccgtgcg

SEQ ID NO: 18982 - RNA, 21 nt, synthetic construct
  source 1..21: mol_type = other RNA
tttatcaaccacttggtgagg

SEQ ID NO: 18983 - RNA, 21 nt, synthetic construct
  source 1..21: mol_type = other RNA
tttatcccgtggatctaggag

SEQ ID NO: 18984 - RNA, 21 nt, synthetic construct
  source 1..21: mol_type = other RNA
tttatttccacccagttgtca

SEQ ID NO: 18985 - RNA, 21 nt, synthetic construct
  source 1..21: mol_type = other RNA
tttcaaggacctgcccagtac

SEQ ID NO: 18986 - RNA, 21 nt, synthetic construct
  source 1..21: mol_type = other RNA
tttcacagggatgcctgtact

SEQ ID NO: 18987 - RNA, 21 nt, synthetic construct
  source 1..21: mol_type = other RNA
tttcactgatcctggtgctgc

SEQ ID NO: 18988 - RNA, 21 nt, synthetic construct
  source 1..21: mol_type = other RNA
tttcagtgctaaaactaggct

SEQ ID NO: 18989 - RNA, 21 nt, synthetic construct
  source 1..21: mol_type = other RNA
tttccaaactgcttctcctct

SEQ ID NO: 18990 - RNA, 21 nt, synthetic construct
  source 1..21: mol_type = other RNA
tttccacacggacacccccct

SEQ ID NO: 18991 - RNA, 21 nt, synthetic construct
  source 1..21: mol_type = other RNA
tttccacccagttgtcatggc

SEQ ID NO: 18992 - RNA, 21 nt, synthetic construct
  source 1..21: mol_type = other RNA
tttccactgagcactgaaggc

SEQ ID NO: 18993 - RNA, 21 nt, synthetic construct
  source 1..21: mol_type = other RNA
tttccatgacctcatgctctt

SEQ ID NO: 18994 - RNA, 21 nt, synthetic construct
  source 1..21: mol_type = other RNA
tttccccactgtcctagcacc

SEQ ID NO: 18995 - RNA, 21 nt, synthetic construct
  source 1..21: mol_type = other RNA
tttccctttcaaggacctgcc

SEQ ID NO: 18996 - RNA, 21 nt, synthetic construct
  source 1..21: mol_type = other RNA
tttccgagcttgacccttgga

SEQ ID NO: 18997 - RNA, 21 nt, synthetic construct
  source 1..21: mol_type = other RNA
tttcctaggactgagggtttc

SEQ ID NO: 18998 - RNA, 21 nt, synthetic construct
  source 1..21: mol_type = other RNA
tttccttaaagagtccccagt

SEQ ID NO: 18999 - RNA, 21 nt, synthetic construct
  source 1..21: mol_type = other RNA
tttcgtggctccctctggagt

SEQ ID NO: 19000 - RNA, 21 nt, synthetic construct
  source 1..21: mol_type = other RNA
tttcgtggtttccactgagca

SEQ ID NO: 19001 - RNA, 21 nt, synthetic construct
  source 1..21: mol_type = other RNA
tttctagtccccaatttatat

SEQ ID NO: 19002 - RNA, 21 nt, synthetic construct
  source 1..21: mol_type = other RNA
tttctcattcttcccttaggg

SEQ ID NO: 19003 - RNA, 21 nt, synthetic construct
  source 1..21: mol_type = other RNA
tttctccacctggggctgtgt

SEQ ID NO: 19004 - RNA, 21 nt, synthetic construct
  source 1..21: mol_type = other RNA
tttctccatccttctttcctt

SEQ ID NO: 19005 - RNA, 21 nt, synthetic construct
  source 1..21: mol_type = other RNA
tttctcgtcctgcatccttct

SEQ ID NO: 19006 - RNA, 21 nt, synthetic construct
  source 1..21: mol_type = other RNA
tttctctttctccatccttct

SEQ ID NO: 19007 - RNA, 21 nt, synthetic construct
  source 1..21: mol_type = other RNA
tttgagagaggaggggctggg

SEQ ID NO: 19008 - RNA, 21 nt, synthetic construct
  source 1..21: mol_type = other RNA
tttgagtccttggcaagccca

SEQ ID NO: 19009 - RNA, 21 nt, synthetic construct
  source 1..21: mol_type = other RNA
tttgcagatagccaggagtcc

SEQ ID NO: 19010 - RNA, 21 nt, synthetic construct
  source 1..21: mol_type = other RNA
tttgccaagcagtcaccccac

SEQ ID NO: 19011 - RNA, 21 nt, synthetic construct
  source 1..21: mol_type = other RNA
tttgcccaggacagcctagtt

SEQ ID NO: 19012 - RNA, 21 nt, synthetic construct
  source 1..21: mol_type = other RNA
tttgccgtgtctaacaggtac

SEQ ID NO: 19013 - RNA, 21 nt, synthetic construct
  source 1..21: mol_type = other RNA
tttggaaaaacaaaatcagaa

SEQ ID NO: 19014 - RNA, 21 nt, synthetic construct
  source 1..21: mol_type = other RNA
tttggacccctaagggaagaa

SEQ ID NO: 19015 - RNA, 21 nt, synthetic construct
  source 1..21: mol_type = other RNA
tttggagaggtgagggacttg

SEQ ID NO: 19016 - RNA, 21 nt, synthetic construct
  source 1..21: mol_type = other RNA
tttggctcttcacctttctag

SEQ ID NO: 19017 - RNA, 21 nt, synthetic construct
  source 1..21: mol_type = other RNA
tttgggtcaggtctgggtgtg

SEQ ID NO: 19018 - RNA, 21 nt, synthetic construct
  source 1..21: mol_type = other RNA
tttgggtggattctcctccaa

SEQ ID NO: 19019 - RNA, 21 nt, synthetic construct
  source 1..21: mol_type = other RNA
tttgtccccccaagttttgga

SEQ ID NO: 19020 - RNA, 21 nt, synthetic construct
  source 1..21: mol_type = other RNA
tttgtgagaatggtgcgtcct

SEQ ID NO: 19021 - RNA, 21 nt, synthetic construct
  source 1..21: mol_type = other RNA
tttgtttttccaaactgcttc

SEQ ID NO: 19022 - RNA, 21 nt, synthetic construct
  source 1..21: mol_type = other RNA
ttttacctgtgagataaggcc

SEQ ID NO: 19023 - RNA, 21 nt, synthetic construct
  source 1..21: mol_type = other RNA
ttttagcactgaaaccctcag

SEQ ID NO: 19024 - RNA, 21 nt, synthetic construct
  source 1..21: mol_type = other RNA
ttttccaaactgcttctcctc

SEQ ID NO: 19025 - RNA, 21 nt, synthetic construct
  source 1..21: mol_type = other RNA
ttttccacacggacacccccc

SEQ ID NO: 19026 - RNA, 21 nt, synthetic construct
  source 1..21: mol_type = other RNA
ttttccccactgtcctagcac

SEQ ID NO: 19027 - RNA, 21 nt, synthetic construct
  source 1..21: mol_type = other RNA
ttttcctaggactgagggttt

SEQ ID NO: 19028 - RNA, 21 nt, synthetic construct
  source 1..21: mol_type = other RNA
ttttcgtggctccctctggag

SEQ ID NO: 19029 - RNA, 21 nt, synthetic construct
  source 1..21: mol_type = other RNA
ttttgccgtgtctaacaggta

SEQ ID NO: 19030 - RNA, 21 nt, synthetic construct
  source 1..21: mol_type = other RNA
ttttggacccctaagggaaga

SEQ ID NO: 19031 - RNA, 21 nt, synthetic construct
  source 1..21: mol_type = other RNA
ttttgggtggattctcctcca

SEQ ID NO: 19032 - RNA, 21 nt, synthetic construct
  source 1..21: mol_type = other RNA
ttttgtccccccaagttttgg

SEQ ID NO: 19033 - RNA, 21 nt, synthetic construct
  source 1..21: mol_type = other RNA
ttttgtttttccaaactgctt

SEQ ID NO: 19034 - RNA, 21 nt, synthetic construct
  source 1..21: mol_type = other RNA
tttttccaaactgcttctcct

SEQ ID NO: 19035 - RNA, 22 nt, synthetic construct
  source 1..22: mol_type = other RNA
aaaaacaaaatcagaataagtt

SEQ ID NO: 19036 - RNA, 22 nt, synthetic construct
  source 1..22: mol_type = other RNA
aaaacaaaatcagaataagttg

SEQ ID NO: 19037 - RNA, 22 nt, synthetic construct
  source 1..22: mol_type = other RNA
aaaacagatccagggacacggt

SEQ ID NO: 19038 - RNA, 22 nt, synthetic construct
  source 1..22: mol_type = other RNA
aaaacagggatggttggtcact

SEQ ID NO: 19039 - RNA, 22 nt, synthetic construct
  source 1..22: mol_type = other RNA
aaaacccccgtcaccacccaca

SEQ ID NO: 19040 - RNA, 22 nt, synthetic construct
  source 1..22: mol_type = other RNA
aaaactaggctgtcctgggcaa

SEQ ID NO: 19041 - RNA, 22 nt, synthetic construct
  source 1..22: mol_type = other RNA
aaaactccctttgtgagaatgg

SEQ ID NO: 19042 - RNA, 22 nt, synthetic construct
  source 1..22: mol_type = other RNA
aaaactgacgcacggaggaaca

SEQ ID NO: 19043 - RNA, 22 nt, synthetic construct
  source 1..22: mol_type = other RNA
aaaacttggggggacaaaagcc

SEQ ID NO: 19044 - RNA, 22 nt, synthetic construct
  source 1..22: mol_type = other RNA
aaaagccgaagtccagggggtc

SEQ ID NO: 19045 - RNA, 22 nt, synthetic construct
  source 1..22: mol_type = other RNA
aaaaggcagcctggtagacagg

SEQ ID NO: 19046 - RNA, 22 nt, synthetic construct
  source 1..22: mol_type = other RNA
aaaatcagaataagttggtcct

SEQ ID NO: 19047 - RNA, 22 nt, synthetic construct
  source 1..22: mol_type = other RNA
aaaatgacccaacagcctctgg

SEQ ID NO: 19048 - RNA, 22 nt, synthetic construct
  source 1..22: mol_type = other RNA
aaacaaaatcagaataagttgg

SEQ ID NO: 19049 - RNA, 22 nt, synthetic construct
  source 1..22: mol_type = other RNA
aaacacagccccaggtggagaa

SEQ ID NO: 19050 - RNA, 22 nt, synthetic construct
  source 1..22: mol_type = other RNA
aaacagatccagggacacggtg

SEQ ID NO: 19051 - RNA, 22 nt, synthetic construct
  source 1..22: mol_type = other RNA
aaacagcataagctggtcaccc

SEQ ID NO: 19052 - RNA, 22 nt, synthetic construct
  source 1..22: mol_type = other RNA
aaacagccagtggccagaggct

SEQ ID NO: 19053 - RNA, 22 nt, synthetic construct
  source 1..22: mol_type = other RNA
aaacaggaagtgaacggggaag

SEQ ID NO: 19054 - RNA, 22 nt, synthetic construct
  source 1..22: mol_type = other RNA
aaacagggatggttggtcactg

SEQ ID NO: 19055 - RNA, 22 nt, synthetic construct
  source 1..22: mol_type = other RNA
aaaccaccccagcagatactct

SEQ ID NO: 19056 - RNA, 22 nt, synthetic construct
  source 1..22: mol_type = other RNA
aaaccacgaaaggactcctggc

SEQ ID NO: 19057 - RNA, 22 nt, synthetic construct
  source 1..22: mol_type = other RNA
aaacccacgtggggtaccctaa

SEQ ID NO: 19058 - RNA, 22 nt, synthetic construct
  source 1..22: mol_type = other RNA
aaacccagaagcccagagcagg

SEQ ID NO: 19059 - RNA, 22 nt, synthetic construct
  source 1..22: mol_type = other RNA
aaacccagccaggtccttccaa

SEQ ID NO: 19060 - RNA, 22 nt, synthetic construct
  source 1..22: mol_type = other RNA
aaacccagctcccctgcttctt

SEQ ID NO: 19061 - RNA, 22 nt, synthetic construct
  source 1..22: mol_type = other RNA
aaacccaggagcccaggccccc

SEQ ID NO: 19062 - RNA, 22 nt, synthetic construct
  source 1..22: mol_type = other RNA
aaacccccgtcaccacccacag

SEQ ID NO: 19063 - RNA, 22 nt, synthetic construct
  source 1..22: mol_type = other RNA
aaaccctcagtcctaggaaaac

SEQ ID NO: 19064 - RNA, 22 nt, synthetic construct
  source 1..22: mol_type = other RNA
aaacgagccgagttcatcccgt

SEQ ID NO: 19065 - RNA, 22 nt, synthetic construct
  source 1..22: mol_type = other RNA
aaacgcaccagacggccgcgtc

SEQ ID NO: 19066 - RNA, 22 nt, synthetic construct
  source 1..22: mol_type = other RNA
aaacggtggcccgtgtcagccc

SEQ ID NO: 19067 - RNA, 22 nt, synthetic construct
  source 1..22: mol_type = other RNA
aaactaggctgtcctgggcaaa

SEQ ID NO: 19068 - RNA, 22 nt, synthetic construct
  source 1..22: mol_type = other RNA
aaactcactcttcggggtatcc

SEQ ID NO: 19069 - RNA, 22 nt, synthetic construct
  source 1..22: mol_type = other RNA
aaactccctttgtgagaatggt

SEQ ID NO: 19070 - RNA, 22 nt, synthetic construct
  source 1..22: mol_type = other RNA
aaactcctagatccacgggata

SEQ ID NO: 19071 - RNA, 22 nt, synthetic construct
  source 1..22: mol_type = other RNA
aaactcgggctgtgaaggggcc

SEQ ID NO: 19072 - RNA, 22 nt, synthetic construct
  source 1..22: mol_type = other RNA
aaactgacgcacggaggaacaa

SEQ ID NO: 19073 - RNA, 22 nt, synthetic construct
  source 1..22: mol_type = other RNA
aaactgcttctcctcttgggaa

SEQ ID NO: 19074 - RNA, 22 nt, synthetic construct
  source 1..22: mol_type = other RNA
aaactggccgggaatcaagagt

SEQ ID NO: 19075 - RNA, 22 nt, synthetic construct
  source 1..22: mol_type = other RNA
aaacttggggggacaaaagccg

SEQ ID NO: 19076 - RNA, 22 nt, synthetic construct
  source 1..22: mol_type = other RNA
aaagaaggatggagaaagagaa

SEQ ID NO: 19077 - RNA, 22 nt, synthetic construct
  source 1..22: mol_type = other RNA
aaagagaaagggagtagaggcg

SEQ ID NO: 19078 - RNA, 22 nt, synthetic construct
  source 1..22: mol_type = other RNA
aaagagtccccagtgctatctg

SEQ ID NO: 19079 - RNA, 22 nt, synthetic construct
  source 1..22: mol_type = other RNA
aaagatgcctgaggcctgggca

SEQ ID NO: 19080 - RNA, 22 nt, synthetic construct
  source 1..22: mol_type = other RNA
aaagccgaagtccagggggtcg

SEQ ID NO: 19081 - RNA, 22 nt, synthetic construct
  source 1..22: mol_type = other RNA
aaagctgcccatctggaggagg

SEQ ID NO: 19082 - RNA, 22 nt, synthetic construct
  source 1..22: mol_type = other RNA
aaaggactcctggctatctgca

SEQ ID NO: 19083 - RNA, 22 nt, synthetic construct
  source 1..22: mol_type = other RNA
aaaggcagcctggtagacaggg

SEQ ID NO: 19084 - RNA, 22 nt, synthetic construct
  source 1..22: mol_type = other RNA
aaaggcccattgctctccttgc

SEQ ID NO: 19085 - RNA, 22 nt, synthetic construct
  source 1..22: mol_type = other RNA
aaagggaaaggcccattgctct

SEQ ID NO: 19086 - RNA, 22 nt, synthetic construct
  source 1..22: mol_type = other RNA
aaagggagtagaggcggccacg

SEQ ID NO: 19087 - RNA, 22 nt, synthetic construct
  source 1..22: mol_type = other RNA
aaagggagttttccacacggac

SEQ ID NO: 19088 - RNA, 22 nt, synthetic construct
  source 1..22: mol_type = other RNA
aaaggtgaagagccaaagttag

SEQ ID NO: 19089 - RNA, 22 nt, synthetic construct
  source 1..22: mol_type = other RNA
aaagttagaactcaggaccaac

SEQ ID NO: 19090 - RNA, 22 nt, synthetic construct
  source 1..22: mol_type = other RNA
aaataaacgagccgagttcatc

SEQ ID NO: 19091 - RNA, 22 nt, synthetic construct
  source 1..22: mol_type = other RNA
aaatcagaataagttggtcctg

SEQ ID NO: 19092 - RNA, 22 nt, synthetic construct
  source 1..22: mol_type = other RNA
aaatgacccaacagcctctggc

SEQ ID NO: 19093 - RNA, 22 nt, synthetic construct
  source 1..22: mol_type = other RNA
aaattaccccccaagtccctca

SEQ ID NO: 19094 - RNA, 22 nt, synthetic construct
  source 1..22: mol_type = other RNA
aaattggggactagaaaggtga

SEQ ID NO: 19095 - RNA, 22 nt, synthetic construct
  source 1..22: mol_type = other RNA
aacaaaatcagaataagttggt

SEQ ID NO: 19096 - RNA, 22 nt, synthetic construct
  source 1..22: mol_type = other RNA
aacaatataaattggggactag

SEQ ID NO: 19097 - RNA, 22 nt, synthetic construct
  source 1..22: mol_type = other RNA
aacacagccccaggtggagaaa

SEQ ID NO: 19098 - RNA, 22 nt, synthetic construct
  source 1..22: mol_type = other RNA
aacacctaggacgcaccattct

SEQ ID NO: 19099 - RNA, 22 nt, synthetic construct
  source 1..22: mol_type = other RNA
aacagagaagagctgggggcct

SEQ ID NO: 19100 - RNA, 22 nt, synthetic construct
  source 1..22: mol_type = other RNA
aacagatccagggacacggtgc

SEQ ID NO: 19101 - RNA, 22 nt, synthetic construct
  source 1..22: mol_type = other RNA
aacagcataagctggtcacccc

SEQ ID NO: 19102 - RNA, 22 nt, synthetic construct
  source 1..22: mol_type = other RNA
aacagccacagcaggggggcga

SEQ ID NO: 19103 - RNA, 22 nt, synthetic construct
  source 1..22: mol_type = other RNA
aacagccagtggccagaggctg

SEQ ID NO: 19104 - RNA, 22 nt, synthetic construct
  source 1..22: mol_type = other RNA
aacagcctctggccactggctg

SEQ ID NO: 19105 - RNA, 22 nt, synthetic construct
  source 1..22: mol_type = other RNA
aacaggaagtgaacggggaagg

SEQ ID NO: 19106 - RNA, 22 nt, synthetic construct
  source 1..22: mol_type = other RNA
aacagggatggttggtcactgt

SEQ ID NO: 19107 - RNA, 22 nt, synthetic construct
  source 1..22: mol_type = other RNA
aacaggtaccatgtggggttcc

SEQ ID NO: 19108 - RNA, 22 nt, synthetic construct
  source 1..22: mol_type = other RNA
aaccaccccagcagatactctg

SEQ ID NO: 19109 - RNA, 22 nt, synthetic construct
  source 1..22: mol_type = other RNA
aaccacgaaaggactcctggct

SEQ ID NO: 19110 - RNA, 22 nt, synthetic construct
  source 1..22: mol_type = other RNA
aaccacttggtgaggctggtac

SEQ ID NO: 19111 - RNA, 22 nt, synthetic construct
  source 1..22: mol_type = other RNA
aaccaggcgtatcttaaacagc

SEQ ID NO: 19112 - RNA, 22 nt, synthetic construct
  source 1..22: mol_type = other RNA
aaccatccctgttttcctagga

SEQ ID NO: 19113 - RNA, 22 nt, synthetic construct
  source 1..22: mol_type = other RNA
aacccacgtggggtaccctaag

SEQ ID NO: 19114 - RNA, 22 nt, synthetic construct
  source 1..22: mol_type = other RNA
aacccagaagcccagagcaggg

SEQ ID NO: 19115 - RNA, 22 nt, synthetic construct
  source 1..22: mol_type = other RNA
aacccagccaggtccttccaag

SEQ ID NO: 19116 - RNA, 22 nt, synthetic construct
  source 1..22: mol_type = other RNA
aacccagctcccctgcttcttg

SEQ ID NO: 19117 - RNA, 22 nt, synthetic construct
  source 1..22: mol_type = other RNA
aacccaggagcccaggccccca

SEQ ID NO: 19118 - RNA, 22 nt, synthetic construct
  source 1..22: mol_type = other RNA
aacccaggaggccaggccccag

SEQ ID NO: 19119 - RNA, 22 nt, synthetic construct
  source 1..22: mol_type = other RNA
aaccccacatggtacctgttag

SEQ ID NO: 19120 - RNA, 22 nt, synthetic construct
  source 1..22: mol_type = other RNA
aaccccagcccaccccaatgct

SEQ ID NO: 19121 - RNA, 22 nt, synthetic construct
  source 1..22: mol_type = other RNA
aacccccgtcaccacccacagg

SEQ ID NO: 19122 - RNA, 22 nt, synthetic construct
  source 1..22: mol_type = other RNA
aaccccctagccactaaggcaa

SEQ ID NO: 19123 - RNA, 22 nt, synthetic construct
  source 1..22: mol_type = other RNA
aacccctccccattcaacccag

SEQ ID NO: 19124 - RNA, 22 nt, synthetic construct
  source 1..22: mol_type = other RNA
aacccctgtagggaaggggcag

SEQ ID NO: 19125 - RNA, 22 nt, synthetic construct
  source 1..22: mol_type = other RNA
aaccctcagtcctaggaaaaca

SEQ ID NO: 19126 - RNA, 22 nt, synthetic construct
  source 1..22: mol_type = other RNA
aacctcttccctagtctgagca

SEQ ID NO: 19127 - RNA, 22 nt, synthetic construct
  source 1..22: mol_type = other RNA
aacctgagaagggaatccctcc

SEQ ID NO: 19128 - RNA, 22 nt, synthetic construct
  source 1..22: mol_type = other RNA
aacctgagctgctctgacgcgg

SEQ ID NO: 19129 - RNA, 22 nt, synthetic construct
  source 1..22: mol_type = other RNA
aacgaagccgtgggcccagggc

SEQ ID NO: 19130 - RNA, 22 nt, synthetic construct
  source 1..22: mol_type = other RNA
aacgagccgagttcatcccgtt

SEQ ID NO: 19131 - RNA, 22 nt, synthetic construct
  source 1..22: mol_type = other RNA
aacgcaccagacggccgcgtca

SEQ ID NO: 19132 - RNA, 22 nt, synthetic construct
  source 1..22: mol_type = other RNA
aacgggatgaactcggctcgtt

SEQ ID NO: 19133 - RNA, 22 nt, synthetic construct
  source 1..22: mol_type = other RNA
aacggggaagggagggggcttc

SEQ ID NO: 19134 - RNA, 22 nt, synthetic construct
  source 1..22: mol_type = other RNA
aacggggatgcaggggaacggg

SEQ ID NO: 19135 - RNA, 22 nt, synthetic construct
  source 1..22: mol_type = other RNA
aacggggctcagtctgaagagc

SEQ ID NO: 19136 - RNA, 22 nt, synthetic construct
  source 1..22: mol_type = other RNA
aacggtggcccgtgtcagcccc

SEQ ID NO: 19137 - RNA, 22 nt, synthetic construct
  source 1..22: mol_type = other RNA
aactaggctgtcctgggcaaac

SEQ ID NO: 19138 - RNA, 22 nt, synthetic construct
  source 1..22: mol_type = other RNA
aactcactcttcggggtatccc

SEQ ID NO: 19139 - RNA, 22 nt, synthetic construct
  source 1..22: mol_type = other RNA
aactcaggaccaacttattctg

SEQ ID NO: 19140 - RNA, 22 nt, synthetic construct
  source 1..22: mol_type = other RNA
aactccctttgtgagaatggtg

SEQ ID NO: 19141 - RNA, 22 nt, synthetic construct
  source 1..22: mol_type = other RNA
aactcctagatccacgggataa

SEQ ID NO: 19142 - RNA, 22 nt, synthetic construct
  source 1..22: mol_type = other RNA
aactcggctcgtttatttccac

SEQ ID NO: 19143 - RNA, 22 nt, synthetic construct
  source 1..22: mol_type = other RNA
aactcgggctgtgaaggggccg

SEQ ID NO: 19144 - RNA, 22 nt, synthetic construct
  source 1..22: mol_type = other RNA
aactgacgcacggaggaacaat

SEQ ID NO: 19145 - RNA, 22 nt, synthetic construct
  source 1..22: mol_type = other RNA
aactgcttctcctcttgggaag

SEQ ID NO: 19146 - RNA, 22 nt, synthetic construct
  source 1..22: mol_type = other RNA
aactggagctgaggaaggagtg

SEQ ID NO: 19147 - RNA, 22 nt, synthetic construct
  source 1..22: mol_type = other RNA
aactggagtgtgacagcctggg

SEQ ID NO: 19148 - RNA, 22 nt, synthetic construct
  source 1..22: mol_type = other RNA
aactggccgggaatcaagagtc

SEQ ID NO: 19149 - RNA, 22 nt, synthetic construct
  source 1..22: mol_type = other RNA
aactgggtggaaataaacgagc

SEQ ID NO: 19150 - RNA, 22 nt, synthetic construct
  source 1..22: mol_type = other RNA
aactgtggggtgactgcttggc

SEQ ID NO: 19151 - RNA, 22 nt, synthetic construct
  source 1..22: mol_type = other RNA
aacttattctgattttgttttt

SEQ ID NO: 19152 - RNA, 22 nt, synthetic construct
  source 1..22: mol_type = other RNA
aacttgggaacagccacagcag

SEQ ID NO: 19153 - RNA, 22 nt, synthetic construct
  source 1..22: mol_type = other RNA
aacttggggggacaaaagccga

SEQ ID NO: 19154 - RNA, 22 nt, synthetic construct
  source 1..22: mol_type = other RNA
aactttggctcttcacctttct

SEQ ID NO: 19155 - RNA, 22 nt, synthetic construct
  source 1..22: mol_type = other RNA
aagaacttgggaacagccacag

SEQ ID NO: 19156 - RNA, 22 nt, synthetic construct
  source 1..22: mol_type = other RNA
aagaagcaggggagctgggttt

SEQ ID NO: 19157 - RNA, 22 nt, synthetic construct
  source 1..22: mol_type = other RNA
aagaaggatggagaaagagaaa

SEQ ID NO: 19158 - RNA, 22 nt, synthetic construct
  source 1..22: mol_type = other RNA
aagaatcctggctccagcccct

SEQ ID NO: 19159 - RNA, 22 nt, synthetic construct
  source 1..22: mol_type = other RNA
aagaatgagaaacggtggcccg

SEQ ID NO: 19160 - RNA, 22 nt, synthetic construct
  source 1..22: mol_type = other RNA
aagacccagaagtccaggcccc

SEQ ID NO: 19161 - RNA, 22 nt, synthetic construct
  source 1..22: mol_type = other RNA
aagagaaagggagtagaggcgg

SEQ ID NO: 19162 - RNA, 22 nt, synthetic construct
  source 1..22: mol_type = other RNA
aagagcagagccaggaacccct

SEQ ID NO: 19163 - RNA, 22 nt, synthetic construct
  source 1..22: mol_type = other RNA
aagagcatgaggtcatggaaac

SEQ ID NO: 19164 - RNA, 22 nt, synthetic construct
  source 1..22: mol_type = other RNA
aagagccaaagttagaactcag

SEQ ID NO: 19165 - RNA, 22 nt, synthetic construct
  source 1..22: mol_type = other RNA
aagagctgggggcctgggctcc

SEQ ID NO: 19166 - RNA, 22 nt, synthetic construct
  source 1..22: mol_type = other RNA
aagaggagaagcagtttggaaa

SEQ ID NO: 19167 - RNA, 22 nt, synthetic construct
  source 1..22: mol_type = other RNA
aagaggttccagcccctcctcc

SEQ ID NO: 19168 - RNA, 22 nt, synthetic construct
  source 1..22: mol_type = other RNA
aagagtcacccagagacagtga

SEQ ID NO: 19169 - RNA, 22 nt, synthetic construct
  source 1..22: mol_type = other RNA
aagagtccccagtgctatctgg

SEQ ID NO: 19170 - RNA, 22 nt, synthetic construct
  source 1..22: mol_type = other RNA
aagagtgagtttgccaagcagt

SEQ ID NO: 19171 - RNA, 22 nt, synthetic construct
  source 1..22: mol_type = other RNA
aagatacgcctggttgcccagt

SEQ ID NO: 19172 - RNA, 22 nt, synthetic construct
  source 1..22: mol_type = other RNA
aagatgcctgaggcctgggcac

SEQ ID NO: 19173 - RNA, 22 nt, synthetic construct
  source 1..22: mol_type = other RNA
aagcaggggagctgggtttggg

SEQ ID NO: 19174 - RNA, 22 nt, synthetic construct
  source 1..22: mol_type = other RNA
aagcagtcaccccacagttgga

SEQ ID NO: 19175 - RNA, 22 nt, synthetic construct
  source 1..22: mol_type = other RNA
aagcagtttggaaaaacaaaat

SEQ ID NO: 19176 - RNA, 22 nt, synthetic construct
  source 1..22: mol_type = other RNA
aagcatcgcccccctgctgtgg

SEQ ID NO: 19177 - RNA, 22 nt, synthetic construct
  source 1..22: mol_type = other RNA
aagcccagagcagggccttagg

SEQ ID NO: 19178 - RNA, 22 nt, synthetic construct
  source 1..22: mol_type = other RNA
aagcccaggagaggcgctcagg

SEQ ID NO: 19179 - RNA, 22 nt, synthetic construct
  source 1..22: mol_type = other RNA
aagccccctcccttccccgttc

SEQ ID NO: 19180 - RNA, 22 nt, synthetic construct
  source 1..22: mol_type = other RNA
aagccgaagtccagggggtcgg

SEQ ID NO: 19181 - RNA, 22 nt, synthetic construct
  source 1..22: mol_type = other RNA
aagccgtgggcccagggctatg

SEQ ID NO: 19182 - RNA, 22 nt, synthetic construct
  source 1..22: mol_type = other RNA
aagcctgagcgcctctcctggg

SEQ ID NO: 19183 - RNA, 22 nt, synthetic construct
  source 1..22: mol_type = other RNA
aagcgccacctgtgggtggtga

SEQ ID NO: 19184 - RNA, 22 nt, synthetic construct
  source 1..22: mol_type = other RNA
aagcgggaccctgctctgggcg

SEQ ID NO: 19185 - RNA, 22 nt, synthetic construct
  source 1..22: mol_type = other RNA
aagctaaactcctagatccacg

SEQ ID NO: 19186 - RNA, 22 nt, synthetic construct
  source 1..22: mol_type = other RNA
aagctcggaaaccaccccagca

SEQ ID NO: 19187 - RNA, 22 nt, synthetic construct
  source 1..22: mol_type = other RNA
aagctgcagcaccaggatcagt

SEQ ID NO: 19188 - RNA, 22 nt, synthetic construct
  source 1..22: mol_type = other RNA
aagctgcccatctggaggaggc

SEQ ID NO: 19189 - RNA, 22 nt, synthetic construct
  source 1..22: mol_type = other RNA
aagctggtcaccccacacccag

SEQ ID NO: 19190 - RNA, 22 nt, synthetic construct
  source 1..22: mol_type = other RNA
aaggaaagaaggatggagaaag

SEQ ID NO: 19191 - RNA, 22 nt, synthetic construct
  source 1..22: mol_type = other RNA
aaggaagctgcagcaccaggat

SEQ ID NO: 19192 - RNA, 22 nt, synthetic construct
  source 1..22: mol_type = other RNA
aaggacctgcccagtacaggca

SEQ ID NO: 19193 - RNA, 22 nt, synthetic construct
  source 1..22: mol_type = other RNA
aaggacctggctgggtttaagg

SEQ ID NO: 19194 - RNA, 22 nt, synthetic construct
  source 1..22: mol_type = other RNA
aaggactcaaacccagaagccc

SEQ ID NO: 19195 - RNA, 22 nt, synthetic construct
  source 1..22: mol_type = other RNA
aaggactcctggctatctgcaa

SEQ ID NO: 19196 - RNA, 22 nt, synthetic construct
  source 1..22: mol_type = other RNA
aaggagagcaatgggcctttcc

SEQ ID NO: 19197 - RNA, 22 nt, synthetic construct
  source 1..22: mol_type = other RNA
aaggaggaggggctggaacctc

SEQ ID NO: 19198 - RNA, 22 nt, synthetic construct
  source 1..22: mol_type = other RNA
aaggagtccaggcccccagcct

SEQ ID NO: 19199 - RNA, 22 nt, synthetic construct
  source 1..22: mol_type = other RNA
aaggagtgaagctaaactccta

SEQ ID NO: 19200 - RNA, 22 nt, synthetic construct
  source 1..22: mol_type = other RNA
aaggatgcaggacgagaaacac

SEQ ID NO: 19201 - RNA, 22 nt, synthetic construct
  source 1..22: mol_type = other RNA
aaggatggagaaagagaaaggg

SEQ ID NO: 19202 - RNA, 22 nt, synthetic construct
  source 1..22: mol_type = other RNA
aaggcaattggggtgcaggaat

SEQ ID NO: 19203 - RNA, 22 nt, synthetic construct
  source 1..22: mol_type = other RNA
aaggcagcctggtagacagggc

SEQ ID NO: 19204 - RNA, 22 nt, synthetic construct
  source 1..22: mol_type = other RNA
aaggcaggaggggctgggggcc

SEQ ID NO: 19205 - RNA, 22 nt, synthetic construct
  source 1..22: mol_type = other RNA
aaggccaccctgtgctgggaca

SEQ ID NO: 19206 - RNA, 22 nt, synthetic construct
  source 1..22: mol_type = other RNA
aaggccagtagccagccccgtc

SEQ ID NO: 19207 - RNA, 22 nt, synthetic construct
  source 1..22: mol_type = other RNA
aaggcccattgctctccttgcc

SEQ ID NO: 19208 - RNA, 22 nt, synthetic construct
  source 1..22: mol_type = other RNA
aaggccctgctctgggcttctg

SEQ ID NO: 19209 - RNA, 22 nt, synthetic construct
  source 1..22: mol_type = other RNA
aaggcctggccggcctgaccac

SEQ ID NO: 19210 - RNA, 22 nt, synthetic construct
  source 1..22: mol_type = other RNA
aaggcctggggcaagtccctcc

SEQ ID NO: 19211 - RNA, 22 nt, synthetic construct
  source 1..22: mol_type = other RNA
aagggaaaggcccattgctctc

SEQ ID NO: 19212 - RNA, 22 nt, synthetic construct
  source 1..22: mol_type = other RNA
aagggaagaatgagaaacggtg

SEQ ID NO: 19213 - RNA, 22 nt, synthetic construct
  source 1..22: mol_type = other RNA
aagggaatccctcctctctgaa

SEQ ID NO: 19214 - RNA, 22 nt, synthetic construct
  source 1..22: mol_type = other RNA
aagggagggggcttctcatctg

SEQ ID NO: 19215 - RNA, 22 nt, synthetic construct
  source 1..22: mol_type = other RNA
aagggagtagaggcggccacga

SEQ ID NO: 19216 - RNA, 22 nt, synthetic construct
  source 1..22: mol_type = other RNA
aagggagttttccacacggaca

SEQ ID NO: 19217 - RNA, 22 nt, synthetic construct
  source 1..22: mol_type = other RNA
aagggctggggcctggcctcct

SEQ ID NO: 19218 - RNA, 22 nt, synthetic construct
  source 1..22: mol_type = other RNA
aaggggcaggagagccaggggc

SEQ ID NO: 19219 - RNA, 22 nt, synthetic construct
  source 1..22: mol_type = other RNA
aaggggccgcacgtgccctggg

SEQ ID NO: 19220 - RNA, 22 nt, synthetic construct
  source 1..22: mol_type = other RNA
aagggggacagggaagcctgag

SEQ ID NO: 19221 - RNA, 22 nt, synthetic construct
  source 1..22: mol_type = other RNA
aagggggatgcaggggaacggg

SEQ ID NO: 19222 - RNA, 22 nt, synthetic construct
  source 1..22: mol_type = other RNA
aagggtcaagctcggaaaccac

SEQ ID NO: 19223 - RNA, 22 nt, synthetic construct
  source 1..22: mol_type = other RNA
aaggtgaagagccaaagttaga

SEQ ID NO: 19224 - RNA, 22 nt, synthetic construct
  source 1..22: mol_type = other RNA
aagtaggtggcctggggcctct

SEQ ID NO: 19225 - RNA, 22 nt, synthetic construct
  source 1..22: mol_type = other RNA
aagtccagggggtcggaggagg

SEQ ID NO: 19226 - RNA, 22 nt, synthetic construct
  source 1..22: mol_type = other RNA
aagtccctcacctctccaaagc

SEQ ID NO: 19227 - RNA, 22 nt, synthetic construct
  source 1..22: mol_type = other RNA
aagtccctcctccgaccccctg

SEQ ID NO: 19228 - RNA, 22 nt, synthetic construct
  source 1..22: mol_type = other RNA
aagtcgggactccagagggagc

SEQ ID NO: 19229 - RNA, 22 nt, synthetic construct
  source 1..22: mol_type = other RNA
aagtgaacggggaagggagggg

SEQ ID NO: 19230 - RNA, 22 nt, synthetic construct
  source 1..22: mol_type = other RNA
aagtggttgataaacccacgtg

SEQ ID NO: 19231 - RNA, 22 nt, synthetic construct
  source 1..22: mol_type = other RNA
aagtgtaaggaagctgcagcac

SEQ ID NO: 19232 - RNA, 22 nt, synthetic construct
  source 1..22: mol_type = other RNA
aagttagaactcaggaccaact

SEQ ID NO: 19233 - RNA, 22 nt, synthetic construct
  source 1..22: mol_type = other RNA
aagttcttagggtaccccacgt

SEQ ID NO: 19234 - RNA, 22 nt, synthetic construct
  source 1..22: mol_type = other RNA
aagttggtcctgagttctaact

SEQ ID NO: 19235 - RNA, 22 nt, synthetic construct
  source 1..22: mol_type = other RNA
aagttttggacccctaagggaa

SEQ ID NO: 19236 - RNA, 22 nt, synthetic construct
  source 1..22: mol_type = other RNA
aataaacgagccgagttcatcc

SEQ ID NO: 19237 - RNA, 22 nt, synthetic construct
  source 1..22: mol_type = other RNA
aataagttggtcctgagttcta

SEQ ID NO: 19238 - RNA, 22 nt, synthetic construct
  source 1..22: mol_type = other RNA
aatataaattggggactagaaa

SEQ ID NO: 19239 - RNA, 22 nt, synthetic construct
  source 1..22: mol_type = other RNA
aatatgtcccagatagcactgg

SEQ ID NO: 19240 - RNA, 22 nt, synthetic construct
  source 1..22: mol_type = other RNA
aatcaagagtcacccagagaca

SEQ ID NO: 19241 - RNA, 22 nt, synthetic construct
  source 1..22: mol_type = other RNA
aatcagaataagttggtcctga

SEQ ID NO: 19242 - RNA, 22 nt, synthetic construct
  source 1..22: mol_type = other RNA
aatccacccaaaaggcagcctg

SEQ ID NO: 19243 - RNA, 22 nt, synthetic construct
  source 1..22: mol_type = other RNA
aatccctcctctctgaacccca

SEQ ID NO: 19244 - RNA, 22 nt, synthetic construct
  source 1..22: mol_type = other RNA
aatcctggctccagcccctcct

SEQ ID NO: 19245 - RNA, 22 nt, synthetic construct
  source 1..22: mol_type = other RNA
aatgacccaacagcctctggcc

SEQ ID NO: 19246 - RNA, 22 nt, synthetic construct
  source 1..22: mol_type = other RNA
aatgagaaacggtggcccgtgt

SEQ ID NO: 19247 - RNA, 22 nt, synthetic construct
  source 1..22: mol_type = other RNA
aatgctccaggcctcctgggat

SEQ ID NO: 19248 - RNA, 22 nt, synthetic construct
  source 1..22: mol_type = other RNA
aatgggcctttccctttcaagg

SEQ ID NO: 19249 - RNA, 22 nt, synthetic construct
  source 1..22: mol_type = other RNA
aatggggagaggctgggggcct

SEQ ID NO: 19250 - RNA, 22 nt, synthetic construct
  source 1..22: mol_type = other RNA
aatggggaggggttgggcctgg

SEQ ID NO: 19251 - RNA, 22 nt, synthetic construct
  source 1..22: mol_type = other RNA
aatgggggcagggtaccagcct

SEQ ID NO: 19252 - RNA, 22 nt, synthetic construct
  source 1..22: mol_type = other RNA
aatggtgcgtcctaggtgttca

SEQ ID NO: 19253 - RNA, 22 nt, synthetic construct
  source 1..22: mol_type = other RNA
aattaccccccaagtccctcac

SEQ ID NO: 19254 - RNA, 22 nt, synthetic construct
  source 1..22: mol_type = other RNA
aattgccttagtggctaggggg

SEQ ID NO: 19255 - RNA, 22 nt, synthetic construct
  source 1..22: mol_type = other RNA
aattggggactagaaaggtgaa

SEQ ID NO: 19256 - RNA, 22 nt, synthetic construct
  source 1..22: mol_type = other RNA
aattggggtgcaggaatggggg

SEQ ID NO: 19257 - RNA, 22 nt, synthetic construct
  source 1..22: mol_type = other RNA
aatttatattgttcctccgtgc

SEQ ID NO: 19258 - RNA, 22 nt, synthetic construct
  source 1..22: mol_type = other RNA
aatttatcccgtggatctagga

SEQ ID NO: 19259 - RNA, 22 nt, synthetic construct
  source 1..22: mol_type = other RNA
acaaaagccgaagtccaggggg

SEQ ID NO: 19260 - RNA, 22 nt, synthetic construct
  source 1..22: mol_type = other RNA
acaaaatcagaataagttggtc

SEQ ID NO: 19261 - RNA, 22 nt, synthetic construct
  source 1..22: mol_type = other RNA
acaaagggagttttccacacgg

SEQ ID NO: 19262 - RNA, 22 nt, synthetic construct
  source 1..22: mol_type = other RNA
acaactgggtggaaataaacga

SEQ ID NO: 19263 - RNA, 22 nt, synthetic construct
  source 1..22: mol_type = other RNA
acaaggcctggggcaagtccct

SEQ ID NO: 19264 - RNA, 22 nt, synthetic construct
  source 1..22: mol_type = other RNA
acaatataaattggggactaga

SEQ ID NO: 19265 - RNA, 22 nt, synthetic construct
  source 1..22: mol_type = other RNA
acacagccccaggtggagaaac

SEQ ID NO: 19266 - RNA, 22 nt, synthetic construct
  source 1..22: mol_type = other RNA
acacaggtgtgcagctgtctca

SEQ ID NO: 19267 - RNA, 22 nt, synthetic construct
  source 1..22: mol_type = other RNA
acacccagacctgacccaaacc

SEQ ID NO: 19268 - RNA, 22 nt, synthetic construct
  source 1..22: mol_type = other RNA
acacccccctcctcaccacagc

SEQ ID NO: 19269 - RNA, 22 nt, synthetic construct
  source 1..22: mol_type = other RNA
acacctaggacgcaccattctc

SEQ ID NO: 19270 - RNA, 22 nt, synthetic construct
  source 1..22: mol_type = other RNA
acacctgtgtgcctgggcccca

SEQ ID NO: 19271 - RNA, 22 nt, synthetic construct
  source 1..22: mol_type = other RNA
acacggacacccccctcctcac

SEQ ID NO: 19272 - RNA, 22 nt, synthetic construct
  source 1..22: mol_type = other RNA
acacggcaaaacccccgtcacc

SEQ ID NO: 19273 - RNA, 22 nt, synthetic construct
  source 1..22: mol_type = other RNA
acacgggccaccgtttctcatt

SEQ ID NO: 19274 - RNA, 22 nt, synthetic construct
  source 1..22: mol_type = other RNA
acacggtgctaggacagtgggg

SEQ ID NO: 19275 - RNA, 22 nt, synthetic construct
  source 1..22: mol_type = other RNA
acactccagttcactgaggccc

SEQ ID NO: 19276 - RNA, 22 nt, synthetic construct
  source 1..22: mol_type = other RNA
acactgggtgggctccgggacc

SEQ ID NO: 19277 - RNA, 22 nt, synthetic construct
  source 1..22: mol_type = other RNA
acacttcccaagaggagaagca

SEQ ID NO: 19278 - RNA, 22 nt, synthetic construct
  source 1..22: mol_type = other RNA
acagactcaggggcctgggcgg

SEQ ID NO: 19279 - RNA, 22 nt, synthetic construct
  source 1..22: mol_type = other RNA
acagagaagagctgggggcctg

SEQ ID NO: 19280 - RNA, 22 nt, synthetic construct
  source 1..22: mol_type = other RNA
acagatccagggacacggtgct

SEQ ID NO: 19281 - RNA, 22 nt, synthetic construct
  source 1..22: mol_type = other RNA
acagcaggggggcgatgcttgg

SEQ ID NO: 19282 - RNA, 22 nt, synthetic construct
  source 1..22: mol_type = other RNA
acagcataagctggtcacccca

SEQ ID NO: 19283 - RNA, 22 nt, synthetic construct
  source 1..22: mol_type = other RNA
acagccacagcaggggggcgat

SEQ ID NO: 19284 - RNA, 22 nt, synthetic construct
  source 1..22: mol_type = other RNA
acagccagtggccagaggctgt

SEQ ID NO: 19285 - RNA, 22 nt, synthetic construct
  source 1..22: mol_type = other RNA
acagccccaggtggagaaactg

SEQ ID NO: 19286 - RNA, 22 nt, synthetic construct
  source 1..22: mol_type = other RNA
acagcccgagtttccatgacct

SEQ ID NO: 19287 - RNA, 22 nt, synthetic construct
  source 1..22: mol_type = other RNA
acagccctgccaggacggggct

SEQ ID NO: 19288 - RNA, 22 nt, synthetic construct
  source 1..22: mol_type = other RNA
acagcctagttttagcactgaa

SEQ ID NO: 19289 - RNA, 22 nt, synthetic construct
  source 1..22: mol_type = other RNA
acagcctctggccactggctgt

SEQ ID NO: 19290 - RNA, 22 nt, synthetic construct
  source 1..22: mol_type = other RNA
acagcctggggcccaggcacac

SEQ ID NO: 19291 - RNA, 22 nt, synthetic construct
  source 1..22: mol_type = other RNA
acagctgcacacctgtgtgcct

SEQ ID NO: 19292 - RNA, 22 nt, synthetic construct
  source 1..22: mol_type = other RNA
acaggaagtgaacggggaaggg

SEQ ID NO: 19293 - RNA, 22 nt, synthetic construct
  source 1..22: mol_type = other RNA
acaggcatccctgtgaaagatg

SEQ ID NO: 19294 - RNA, 22 nt, synthetic construct
  source 1..22: mol_type = other RNA
acagggaagcctgagcgcctct

SEQ ID NO: 19295 - RNA, 22 nt, synthetic construct
  source 1..22: mol_type = other RNA
acagggatgcctgtactgggca

SEQ ID NO: 19296 - RNA, 22 nt, synthetic construct
  source 1..22: mol_type = other RNA
acagggatggttggtcactgtc

SEQ ID NO: 19297 - RNA, 22 nt, synthetic construct
  source 1..22: mol_type = other RNA
acagggctggggtggcctctcg

SEQ ID NO: 19298 - RNA, 22 nt, synthetic construct
  source 1..22: mol_type = other RNA
acaggggttcctggctctgctc

SEQ ID NO: 19299 - RNA, 22 nt, synthetic construct
  source 1..22: mol_type = other RNA
acagggtggccttcctccaccc

SEQ ID NO: 19300 - RNA, 22 nt, synthetic construct
  source 1..22: mol_type = other RNA
acaggtaaaactgacgcacgga

SEQ ID NO: 19301 - RNA, 22 nt, synthetic construct
  source 1..22: mol_type = other RNA
acaggtaccatgtggggttccc

SEQ ID NO: 19302 - RNA, 22 nt, synthetic construct
  source 1..22: mol_type = other RNA
acaggtggcgcttccagtgctc

SEQ ID NO: 19303 - RNA, 22 nt, synthetic construct
  source 1..22: mol_type = other RNA
acaggtgtgcagctgtctcacc

SEQ ID NO: 19304 - RNA, 22 nt, synthetic construct
  source 1..22: mol_type = other RNA
acagtgaccaaccatccctgtt

SEQ ID NO: 19305 - RNA, 22 nt, synthetic construct
  source 1..22: mol_type = other RNA
acagtggggaaaatgacccaac

SEQ ID NO: 19306 - RNA, 22 nt, synthetic construct
  source 1..22: mol_type = other RNA
acagttggaggagaatccaccc

SEQ ID NO: 19307 - RNA, 22 nt, synthetic construct
  source 1..22: mol_type = other RNA
acatattcctccgcccagagca

SEQ ID NO: 19308 - RNA, 22 nt, synthetic construct
  source 1..22: mol_type = other RNA
acatggtacctgttagacacgg

SEQ ID NO: 19309 - RNA, 22 nt, synthetic construct
  source 1..22: mol_type = other RNA
accaaccatccctgttttccta

SEQ ID NO: 19310 - RNA, 22 nt, synthetic construct
  source 1..22: mol_type = other RNA
accaacttattctgattttgtt

SEQ ID NO: 19311 - RNA, 22 nt, synthetic construct
  source 1..22: mol_type = other RNA
accaagtggttgataaacccac

SEQ ID NO: 19312 - RNA, 22 nt, synthetic construct
  source 1..22: mol_type = other RNA
accacagccctgccaggacggg

SEQ ID NO: 19313 - RNA, 22 nt, synthetic construct
  source 1..22: mol_type = other RNA
accacccacaggtggcgcttcc

SEQ ID NO: 19314 - RNA, 22 nt, synthetic construct
  source 1..22: mol_type = other RNA
accaccccagcagatactctgc

SEQ ID NO: 19315 - RNA, 22 nt, synthetic construct
  source 1..22: mol_type = other RNA
accacgaaaggactcctggcta

SEQ ID NO: 19316 - RNA, 22 nt, synthetic construct
  source 1..22: mol_type = other RNA
accactgggcaaccaggcgtat

SEQ ID NO: 19317 - RNA, 22 nt, synthetic construct
  source 1..22: mol_type = other RNA
accacttggtgaggctggtacc

SEQ ID NO: 19318 - RNA, 22 nt, synthetic construct
  source 1..22: mol_type = other RNA
accagacggccgcgtcagagca

SEQ ID NO: 19319 - RNA, 22 nt, synthetic construct
  source 1..22: mol_type = other RNA
accagcctcaccaagtggttga

SEQ ID NO: 19320 - RNA, 22 nt, synthetic construct
  source 1..22: mol_type = other RNA
accagcttatgctgtttgccca

SEQ ID NO: 19321 - RNA, 22 nt, synthetic construct
  source 1..22: mol_type = other RNA
accaggatcagtgaaacgcacc

SEQ ID NO: 19322 - RNA, 22 nt, synthetic construct
  source 1..22: mol_type = other RNA
accaggcgtatcttaaacagcc

SEQ ID NO: 19323 - RNA, 22 nt, synthetic construct
  source 1..22: mol_type = other RNA
accaggctgccttttgggtgga

SEQ ID NO: 19324 - RNA, 22 nt, synthetic construct
  source 1..22: mol_type = other RNA
accagggactccagagtccagg

SEQ ID NO: 19325 - RNA, 22 nt, synthetic construct
  source 1..22: mol_type = other RNA
accaggtcgtggccgcctctac

SEQ ID NO: 19326 - RNA, 22 nt, synthetic construct
  source 1..22: mol_type = other RNA
accatccctgttttcctaggac

SEQ ID NO: 19327 - RNA, 22 nt, synthetic construct
  source 1..22: mol_type = other RNA
accatctcatgcccctggctct

SEQ ID NO: 19328 - RNA, 22 nt, synthetic construct
  source 1..22: mol_type = other RNA
accatgtggggttcccgcaccc

SEQ ID NO: 19329 - RNA, 22 nt, synthetic construct
  source 1..22: mol_type = other RNA
accattctcacaaagggagttt

SEQ ID NO: 19330 - RNA, 22 nt, synthetic construct
  source 1..22: mol_type = other RNA
acccaaaaggcagcctggtaga

SEQ ID NO: 19331 - RNA, 22 nt, synthetic construct
  source 1..22: mol_type = other RNA
acccaaacccagctcccctgct

SEQ ID NO: 19332 - RNA, 22 nt, synthetic construct
  source 1..22: mol_type = other RNA
acccaacagcctctggccactg

SEQ ID NO: 19333 - RNA, 22 nt, synthetic construct
  source 1..22: mol_type = other RNA
acccacaggtggcgcttccagt

SEQ ID NO: 19334 - RNA, 22 nt, synthetic construct
  source 1..22: mol_type = other RNA
acccacgagtccaggccccagc

SEQ ID NO: 19335 - RNA, 22 nt, synthetic construct
  source 1..22: mol_type = other RNA
acccacgtggggtaccctaaga

SEQ ID NO: 19336 - RNA, 22 nt, synthetic construct
  source 1..22: mol_type = other RNA
acccagaagcccagagcagggc

SEQ ID NO: 19337 - RNA, 22 nt, synthetic construct
  source 1..22: mol_type = other RNA
acccagacctgacccaaaccca

SEQ ID NO: 19338 - RNA, 22 nt, synthetic construct
  source 1..22: mol_type = other RNA
acccagagacagtgaccaacca

SEQ ID NO: 19339 - RNA, 22 nt, synthetic construct
  source 1..22: mol_type = other RNA
acccagatgagaagccccctcc

SEQ ID NO: 19340 - RNA, 22 nt, synthetic construct
  source 1..22: mol_type = other RNA
acccagccaggtccttccaagg

SEQ ID NO: 19341 - RNA, 22 nt, synthetic construct
  source 1..22: mol_type = other RNA
acccagctcccctgcttcttgg

SEQ ID NO: 19342 - RNA, 22 nt, synthetic construct
  source 1..22: mol_type = other RNA
acccaggagcccaggcccccag

SEQ ID NO: 19343 - RNA, 22 nt, synthetic construct
  source 1..22: mol_type = other RNA
acccaggaggccaggccccagc

SEQ ID NO: 19344 - RNA, 22 nt, synthetic construct
  source 1..22: mol_type = other RNA
acccaggagtccaggcccccag

SEQ ID NO: 19345 - RNA, 22 nt, synthetic construct
  source 1..22: mol_type = other RNA
acccaggggtccaggcccagcc

SEQ ID NO: 19346 - RNA, 22 nt, synthetic construct
  source 1..22: mol_type = other RNA
acccagtgtccacaaggcctgg

SEQ ID NO: 19347 - RNA, 22 nt, synthetic construct
  source 1..22: mol_type = other RNA
acccagttgtcatggcgatagg

SEQ ID NO: 19348 - RNA, 22 nt, synthetic construct
  source 1..22: mol_type = other RNA
accccaatgctccaggcctcct

SEQ ID NO: 19349 - RNA, 22 nt, synthetic construct
  source 1..22: mol_type = other RNA
accccaattgccttagtggcta

SEQ ID NO: 19350 - RNA, 22 nt, synthetic construct
  source 1..22: mol_type = other RNA
accccacacccagacctgaccc

SEQ ID NO: 19351 - RNA, 22 nt, synthetic construct
  source 1..22: mol_type = other RNA
accccacagttggaggagaatc

SEQ ID NO: 19352 - RNA, 22 nt, synthetic construct
  source 1..22: mol_type = other RNA
accccacatggtacctgttaga

SEQ ID NO: 19353 - RNA, 22 nt, synthetic construct
  source 1..22: mol_type = other RNA
accccacgagaggccaccccag

SEQ ID NO: 19354 - RNA, 22 nt, synthetic construct
  source 1..22: mol_type = other RNA
accccacgtgggtttatcaacc

SEQ ID NO: 19355 - RNA, 22 nt, synthetic construct
  source 1..22: mol_type = other RNA
accccagcagatactctgcagg

SEQ ID NO: 19356 - RNA, 22 nt, synthetic construct
  source 1..22: mol_type = other RNA
accccagcccaccccaatgctc

SEQ ID NO: 19357 - RNA, 22 nt, synthetic construct
  source 1..22: mol_type = other RNA
accccagccctgtctaccaggc

SEQ ID NO: 19358 - RNA, 22 nt, synthetic construct
  source 1..22: mol_type = other RNA
accccccaagtccctcacctct

SEQ ID NO: 19359 - RNA, 22 nt, synthetic construct
  source 1..22: mol_type = other RNA
acccccctcctcaccacagccc

SEQ ID NO: 19360 - RNA, 22 nt, synthetic construct
  source 1..22: mol_type = other RNA
acccccgtcaccacccacaggt

SEQ ID NO: 19361 - RNA, 22 nt, synthetic construct
  source 1..22: mol_type = other RNA
accccctagccactaaggcaat

SEQ ID NO: 19362 - RNA, 22 nt, synthetic construct
  source 1..22: mol_type = other RNA
accccctggacttcggcttttg

SEQ ID NO: 19363 - RNA, 22 nt, synthetic construct
  source 1..22: mol_type = other RNA
accccgaagagtgagtttgcca

SEQ ID NO: 19364 - RNA, 22 nt, synthetic construct
  source 1..22: mol_type = other RNA
acccctaagggaagaatgagaa

SEQ ID NO: 19365 - RNA, 22 nt, synthetic construct
  source 1..22: mol_type = other RNA
acccctccccattcaacccagg

SEQ ID NO: 19366 - RNA, 22 nt, synthetic construct
  source 1..22: mol_type = other RNA
acccctctgggagtcccgccca

SEQ ID NO: 19367 - RNA, 22 nt, synthetic construct
  source 1..22: mol_type = other RNA
acccctgggtctgaatggggag

SEQ ID NO: 19368 - RNA, 22 nt, synthetic construct
  source 1..22: mol_type = other RNA
acccctgtagggaaggggcagg

SEQ ID NO: 19369 - RNA, 22 nt, synthetic construct
  source 1..22: mol_type = other RNA
accctaagaacttgggaacagc

SEQ ID NO: 19370 - RNA, 22 nt, synthetic construct
  source 1..22: mol_type = other RNA
accctcagacccaggagtccag

SEQ ID NO: 19371 - RNA, 22 nt, synthetic construct
  source 1..22: mol_type = other RNA
accctcagtcctaggaaaacag

SEQ ID NO: 19372 - RNA, 22 nt, synthetic construct
  source 1..22: mol_type = other RNA
accctctcccagaacctgagct

SEQ ID NO: 19373 - RNA, 22 nt, synthetic construct
  source 1..22: mol_type = other RNA
accctgcatagccctgggccca

SEQ ID NO: 19374 - RNA, 22 nt, synthetic construct
  source 1..22: mol_type = other RNA
accctgcccccattcctgcacc

SEQ ID NO: 19375 - RNA, 22 nt, synthetic construct
  source 1..22: mol_type = other RNA
accctgcgctaccctctcccag

SEQ ID NO: 19376 - RNA, 22 nt, synthetic construct
  source 1..22: mol_type = other RNA
accctgctctgggcggaggaat

SEQ ID NO: 19377 - RNA, 22 nt, synthetic construct
  source 1..22: mol_type = other RNA
accctgtgctgggacagactca

SEQ ID NO: 19378 - RNA, 22 nt, synthetic construct
  source 1..22: mol_type = other RNA
acccttggaaggacctggctgg

SEQ ID NO: 19379 - RNA, 22 nt, synthetic construct
  source 1..22: mol_type = other RNA
accgtgtccctggatctgtttt

SEQ ID NO: 19380 - RNA, 22 nt, synthetic construct
  source 1..22: mol_type = other RNA
accgtttctcattcttccctta

SEQ ID NO: 19381 - RNA, 22 nt, synthetic construct
  source 1..22: mol_type = other RNA
acctacttggcctggaccccac

SEQ ID NO: 19382 - RNA, 22 nt, synthetic construct
  source 1..22: mol_type = other RNA
acctaggacgcaccattctcac

SEQ ID NO: 19383 - RNA, 22 nt, synthetic construct
  source 1..22: mol_type = other RNA
acctcatgctcttggccctcgt

SEQ ID NO: 19384 - RNA, 22 nt, synthetic construct
  source 1..22: mol_type = other RNA
acctctccaaagctgcccatct

SEQ ID NO: 19385 - RNA, 22 nt, synthetic construct
  source 1..22: mol_type = other RNA
acctcttccctagtctgagcac

SEQ ID NO: 19386 - RNA, 22 nt, synthetic construct
  source 1..22: mol_type = other RNA
acctgaactggagctgaggaag

SEQ ID NO: 19387 - RNA, 22 nt, synthetic construct
  source 1..22: mol_type = other RNA
acctgacccaaacccagctccc

SEQ ID NO: 19388 - RNA, 22 nt, synthetic construct
  source 1..22: mol_type = other RNA
acctgagaagggaatccctcct

SEQ ID NO: 19389 - RNA, 22 nt, synthetic construct
  source 1..22: mol_type = other RNA
acctgagctgctctgacgcggc

SEQ ID NO: 19390 - RNA, 22 nt, synthetic construct
  source 1..22: mol_type = other RNA
acctgcccagtacaggcatccc

SEQ ID NO: 19391 - RNA, 22 nt, synthetic construct
  source 1..22: mol_type = other RNA
acctgcccggttctcagtggcc

SEQ ID NO: 19392 - RNA, 22 nt, synthetic construct
  source 1..22: mol_type = other RNA
acctgcctggagaaggatgcag

SEQ ID NO: 19393 - RNA, 22 nt, synthetic construct
  source 1..22: mol_type = other RNA
acctggctgggtttaaggcagg

SEQ ID NO: 19394 - RNA, 22 nt, synthetic construct
  source 1..22: mol_type = other RNA
acctggggctgtgtttctcgtc

SEQ ID NO: 19395 - RNA, 22 nt, synthetic construct
  source 1..22: mol_type = other RNA
acctggtgaacacctaggacgc

SEQ ID NO: 19396 - RNA, 22 nt, synthetic construct
  source 1..22: mol_type = other RNA
acctgtgagataaggccagtag

SEQ ID NO: 19397 - RNA, 22 nt, synthetic construct
  source 1..22: mol_type = other RNA
acctgtgggtggtgacgggggt

SEQ ID NO: 19398 - RNA, 22 nt, synthetic construct
  source 1..22: mol_type = other RNA
acctgtgtgcctgggccccagg

SEQ ID NO: 19399 - RNA, 22 nt, synthetic construct
  source 1..22: mol_type = other RNA
acctgttagacacggcaaaacc

SEQ ID NO: 19400 - RNA, 22 nt, synthetic construct
  source 1..22: mol_type = other RNA
acctttctagtccccaatttat

SEQ ID NO: 19401 - RNA, 22 nt, synthetic construct
  source 1..22: mol_type = other RNA
acgaaaacagatccagggacac

SEQ ID NO: 19402 - RNA, 22 nt, synthetic construct
  source 1..22: mol_type = other RNA
acgaaaggactcctggctatct

SEQ ID NO: 19403 - RNA, 22 nt, synthetic construct
  source 1..22: mol_type = other RNA
acgaagccgtgggcccagggct

SEQ ID NO: 19404 - RNA, 22 nt, synthetic construct
  source 1..22: mol_type = other RNA
acgacctggtgaacacctagga

SEQ ID NO: 19405 - RNA, 22 nt, synthetic construct
  source 1..22: mol_type = other RNA
acgagaaacacagccccaggtg

SEQ ID NO: 19406 - RNA, 22 nt, synthetic construct
  source 1..22: mol_type = other RNA
acgagaggccaccccagccctg

SEQ ID NO: 19407 - RNA, 22 nt, synthetic construct
  source 1..22: mol_type = other RNA
acgagccgagttcatcccgttc

SEQ ID NO: 19408 - RNA, 22 nt, synthetic construct
  source 1..22: mol_type = other RNA
acgaggaagggggacagggaag

SEQ ID NO: 19409 - RNA, 22 nt, synthetic construct
  source 1..22: mol_type = other RNA
acgagggccaagagcatgaggt

SEQ ID NO: 19410 - RNA, 22 nt, synthetic construct
  source 1..22: mol_type = other RNA
acgagtccaggccccagcccct

SEQ ID NO: 19411 - RNA, 22 nt, synthetic construct
  source 1..22: mol_type = other RNA
acgcaccagacggccgcgtcag

SEQ ID NO: 19412 - RNA, 22 nt, synthetic construct
  source 1..22: mol_type = other RNA
acgcaccattctcacaaaggga

SEQ ID NO: 19413 - RNA, 22 nt, synthetic construct
  source 1..22: mol_type = other RNA
acgcacggaggaacaatataaa

SEQ ID NO: 19414 - RNA, 22 nt, synthetic construct
  source 1..22: mol_type = other RNA
acgcctggttgcccagtggtca

SEQ ID NO: 19415 - RNA, 22 nt, synthetic construct
  source 1..22: mol_type = other RNA
acgcggccgtctggtgcgtttc

SEQ ID NO: 19416 - RNA, 22 nt, synthetic construct
  source 1..22: mol_type = other RNA
acggacacccccctcctcacca

SEQ ID NO: 19417 - RNA, 22 nt, synthetic construct
  source 1..22: mol_type = other RNA
acggaggaacaatataaattgg

SEQ ID NO: 19418 - RNA, 22 nt, synthetic construct
  source 1..22: mol_type = other RNA
acggcaaaacccccgtcaccac

SEQ ID NO: 19419 - RNA, 22 nt, synthetic construct
  source 1..22: mol_type = other RNA
acggccgcgtcagagcagctca

SEQ ID NO: 19420 - RNA, 22 nt, synthetic construct
  source 1..22: mol_type = other RNA
acggcttcgttcctgcagagta

SEQ ID NO: 19421 - RNA, 22 nt, synthetic construct
  source 1..22: mol_type = other RNA
acgggataaattaccccccaag

SEQ ID NO: 19422 - RNA, 22 nt, synthetic construct
  source 1..22: mol_type = other RNA
acgggatgaactcggctcgttt

SEQ ID NO: 19423 - RNA, 22 nt, synthetic construct
  source 1..22: mol_type = other RNA
acgggccaccgtttctcattct

SEQ ID NO: 19424 - RNA, 22 nt, synthetic construct
  source 1..22: mol_type = other RNA
acggggaagggagggggcttct

SEQ ID NO: 19425 - RNA, 22 nt, synthetic construct
  source 1..22: mol_type = other RNA
acggggatgcaggggaacgggg

SEQ ID NO: 19426 - RNA, 22 nt, synthetic construct
  source 1..22: mol_type = other RNA
acggggccctgcagccaggggc

SEQ ID NO: 19427 - RNA, 22 nt, synthetic construct
  source 1..22: mol_type = other RNA
acggggctcagtctgaagagca

SEQ ID NO: 19428 - RNA, 22 nt, synthetic construct
  source 1..22: mol_type = other RNA
acggggctggctactggcctta

SEQ ID NO: 19429 - RNA, 22 nt, synthetic construct
  source 1..22: mol_type = other RNA
acgggggttttgccgtgtctaa

SEQ ID NO: 19430 - RNA, 22 nt, synthetic construct
  source 1..22: mol_type = other RNA
acggtgctaggacagtggggaa

SEQ ID NO: 19431 - RNA, 22 nt, synthetic construct
  source 1..22: mol_type = other RNA
acggtggcccgtgtcagcccct

SEQ ID NO: 19432 - RNA, 22 nt, synthetic construct
  source 1..22: mol_type = other RNA
acggtgtcccagcaagtcggga

SEQ ID NO: 19433 - RNA, 22 nt, synthetic construct
  source 1..22: mol_type = other RNA
acgtaacctgagaagggaatcc

SEQ ID NO: 19434 - RNA, 22 nt, synthetic construct
  source 1..22: mol_type = other RNA
acgtgccctgggaacgggatga

SEQ ID NO: 19435 - RNA, 22 nt, synthetic construct
  source 1..22: mol_type = other RNA
acgtgcggccccttcacagccc

SEQ ID NO: 19436 - RNA, 22 nt, synthetic construct
  source 1..22: mol_type = other RNA
acgtggccaagaagcaggggag

SEQ ID NO: 19437 - RNA, 22 nt, synthetic construct
  source 1..22: mol_type = other RNA
acgtggggtaccctaagaactt

SEQ ID NO: 19438 - RNA, 22 nt, synthetic construct
  source 1..22: mol_type = other RNA
acgtgggtttatcaaccacttg

SEQ ID NO: 19439 - RNA, 22 nt, synthetic construct
  source 1..22: mol_type = other RNA
actaaggcaattggggtgcagg

SEQ ID NO: 19440 - RNA, 22 nt, synthetic construct
  source 1..22: mol_type = other RNA
actagaaaggtgaagagccaaa

SEQ ID NO: 19441 - RNA, 22 nt, synthetic construct
  source 1..22: mol_type = other RNA
actaggctgtcctgggcaaaca

SEQ ID NO: 19442 - RNA, 22 nt, synthetic construct
  source 1..22: mol_type = other RNA
actagggaagaggttccagccc

SEQ ID NO: 19443 - RNA, 22 nt, synthetic construct
  source 1..22: mol_type = other RNA
actcaaacccagaagcccagag

SEQ ID NO: 19444 - RNA, 22 nt, synthetic construct
  source 1..22: mol_type = other RNA
actcactcttcggggtatccca

SEQ ID NO: 19445 - RNA, 22 nt, synthetic construct
  source 1..22: mol_type = other RNA
actcaggaccaacttattctga

SEQ ID NO: 19446 - RNA, 22 nt, synthetic construct
  source 1..22: mol_type = other RNA
actcaggggcctgggcgggact

SEQ ID NO: 19447 - RNA, 22 nt, synthetic construct
  source 1..22: mol_type = other RNA
actccagagggagccacgaaaa

SEQ ID NO: 19448 - RNA, 22 nt, synthetic construct
  source 1..22: mol_type = other RNA
actccagagtccaggcccaacc

SEQ ID NO: 19449 - RNA, 22 nt, synthetic construct
  source 1..22: mol_type = other RNA
actccagttcactgaggccccc

SEQ ID NO: 19450 - RNA, 22 nt, synthetic construct
  source 1..22: mol_type = other RNA
actcccagaggggtgagacagc

SEQ ID NO: 19451 - RNA, 22 nt, synthetic construct
  source 1..22: mol_type = other RNA
actccctttctctttctccatc

SEQ ID NO: 19452 - RNA, 22 nt, synthetic construct
  source 1..22: mol_type = other RNA
actccctttgtgagaatggtgc

SEQ ID NO: 19453 - RNA, 22 nt, synthetic construct
  source 1..22: mol_type = other RNA
actcctagatccacgggataaa

SEQ ID NO: 19454 - RNA, 22 nt, synthetic construct
  source 1..22: mol_type = other RNA
actcctggctatctgcaaacag

SEQ ID NO: 19455 - RNA, 22 nt, synthetic construct
  source 1..22: mol_type = other RNA
actcctggctctgaaggaggag

SEQ ID NO: 19456 - RNA, 22 nt, synthetic construct
  source 1..22: mol_type = other RNA
actcctgggtctgagggtggag

SEQ ID NO: 19457 - RNA, 22 nt, synthetic construct
  source 1..22: mol_type = other RNA
actccttcatctgagggcggaa

SEQ ID NO: 19458 - RNA, 22 nt, synthetic construct
  source 1..22: mol_type = other RNA
actccttcctcagctccagttc

SEQ ID NO: 19459 - RNA, 22 nt, synthetic construct
  source 1..22: mol_type = other RNA
actcggctcgtttatttccacc

SEQ ID NO: 19460 - RNA, 22 nt, synthetic construct
  source 1..22: mol_type = other RNA
actcgggctgtgaaggggccgc

SEQ ID NO: 19461 - RNA, 22 nt, synthetic construct
  source 1..22: mol_type = other RNA
actcgtgggtctgagggaggag

SEQ ID NO: 19462 - RNA, 22 nt, synthetic construct
  source 1..22: mol_type = other RNA
actctagcccccaaccccctag

SEQ ID NO: 19463 - RNA, 22 nt, synthetic construct
  source 1..22: mol_type = other RNA
actctgcaggaacgaagccgtg

SEQ ID NO: 19464 - RNA, 22 nt, synthetic construct
  source 1..22: mol_type = other RNA
actctggagtccctggtgccca

SEQ ID NO: 19465 - RNA, 22 nt, synthetic construct
  source 1..22: mol_type = other RNA
actcttcggggtatcccaggag

SEQ ID NO: 19466 - RNA, 22 nt, synthetic construct
  source 1..22: mol_type = other RNA
actcttgattcccggccagttt

SEQ ID NO: 19467 - RNA, 22 nt, synthetic construct
  source 1..22: mol_type = other RNA
actctttaaggaaagaaggatg

SEQ ID NO: 19468 - RNA, 22 nt, synthetic construct
  source 1..22: mol_type = other RNA
actgaaaccctcagtcctagga

SEQ ID NO: 19469 - RNA, 22 nt, synthetic construct
  source 1..22: mol_type = other RNA
actgaaggcctggccggcctga

SEQ ID NO: 19470 - RNA, 22 nt, synthetic construct
  source 1..22: mol_type = other RNA
actgacgcacggaggaacaata

SEQ ID NO: 19471 - RNA, 22 nt, synthetic construct
  source 1..22: mol_type = other RNA
actgagaaccgggcaggtcacg

SEQ ID NO: 19472 - RNA, 22 nt, synthetic construct
  source 1..22: mol_type = other RNA
actgagcactgaaggcctggcc

SEQ ID NO: 19473 - RNA, 22 nt, synthetic construct
  source 1..22: mol_type = other RNA
actgagccccgttcccctgcat

SEQ ID NO: 19474 - RNA, 22 nt, synthetic construct
  source 1..22: mol_type = other RNA
actgaggccccctctgcacggg

SEQ ID NO: 19475 - RNA, 22 nt, synthetic construct
  source 1..22: mol_type = other RNA
actgagggtttcagtgctaaaa

SEQ ID NO: 19476 - RNA, 22 nt, synthetic construct
  source 1..22: mol_type = other RNA
actgatcctggtgctgcagctt

SEQ ID NO: 19477 - RNA, 22 nt, synthetic construct
  source 1..22: mol_type = other RNA
actgcttctcctcttgggaagt

SEQ ID NO: 19478 - RNA, 22 nt, synthetic construct
  source 1..22: mol_type = other RNA
actgcttggcaaactcactctt

SEQ ID NO: 19479 - RNA, 22 nt, synthetic construct
  source 1..22: mol_type = other RNA
actggaagcgccacctgtgggt

SEQ ID NO: 19480 - RNA, 22 nt, synthetic construct
  source 1..22: mol_type = other RNA
actggagctgaggaaggagtga

SEQ ID NO: 19481 - RNA, 22 nt, synthetic construct
  source 1..22: mol_type = other RNA
actggagtgtgacagcctgggg

SEQ ID NO: 19482 - RNA, 22 nt, synthetic construct
  source 1..22: mol_type = other RNA
actggccgggaatcaagagtca

SEQ ID NO: 19483 - RNA, 22 nt, synthetic construct
  source 1..22: mol_type = other RNA
actggccttatctcacaggtaa

SEQ ID NO: 19484 - RNA, 22 nt, synthetic construct
  source 1..22: mol_type = other RNA
actggctgtttaagatacgcct

SEQ ID NO: 19485 - RNA, 22 nt, synthetic construct
  source 1..22: mol_type = other RNA
actgggcaaccaggcgtatctt

SEQ ID NO: 19486 - RNA, 22 nt, synthetic construct
  source 1..22: mol_type = other RNA
actgggcaggtccttgaaaggg

SEQ ID NO: 19487 - RNA, 22 nt, synthetic construct
  source 1..22: mol_type = other RNA
actggggactctttaaggaaag

SEQ ID NO: 19488 - RNA, 22 nt, synthetic construct
  source 1..22: mol_type = other RNA
actgggggcctggactcctggg

SEQ ID NO: 19489 - RNA, 22 nt, synthetic construct
  source 1..22: mol_type = other RNA
actgggtggaaataaacgagcc

SEQ ID NO: 19490 - RNA, 22 nt, synthetic construct
  source 1..22: mol_type = other RNA
actgggtgggctccgggacctg

SEQ ID NO: 19491 - RNA, 22 nt, synthetic construct
  source 1..22: mol_type = other RNA
actgtcctagcaccgtgtccct

SEQ ID NO: 19492 - RNA, 22 nt, synthetic construct
  source 1..22: mol_type = other RNA
actgtctctgggtgactcttga

SEQ ID NO: 19493 - RNA, 22 nt, synthetic construct
  source 1..22: mol_type = other RNA
actgtggggtgactgcttggca

SEQ ID NO: 19494 - RNA, 22 nt, synthetic construct
  source 1..22: mol_type = other RNA
acttattctgattttgtttttc

SEQ ID NO: 19495 - RNA, 22 nt, synthetic construct
  source 1..22: mol_type = other RNA
acttcccaagaggagaagcagt

SEQ ID NO: 19496 - RNA, 22 nt, synthetic construct
  source 1..22: mol_type = other RNA
acttcctgtttgcagatagcca

SEQ ID NO: 19497 - RNA, 22 nt, synthetic construct
  source 1..22: mol_type = other RNA
acttcggcttttgtccccccaa

SEQ ID NO: 19498 - RNA, 22 nt, synthetic construct
  source 1..22: mol_type = other RNA
acttctgggtcttagggaggcg

SEQ ID NO: 19499 - RNA, 22 nt, synthetic construct
  source 1..22: mol_type = other RNA
acttgccccaggccttgtggac

SEQ ID NO: 19500 - RNA, 22 nt, synthetic construct
  source 1..22: mol_type = other RNA
acttggcctggaccccacgaga

SEQ ID NO: 19501 - RNA, 22 nt, synthetic construct
  source 1..22: mol_type = other RNA
acttgggaacagccacagcagg

SEQ ID NO: 19502 - RNA, 22 nt, synthetic construct
  source 1..22: mol_type = other RNA
acttggggggacaaaagccgaa

SEQ ID NO: 19503 - RNA, 22 nt, synthetic construct
  source 1..22: mol_type = other RNA
acttggggggtaatttatcccg

SEQ ID NO: 19504 - RNA, 22 nt, synthetic construct
  source 1..22: mol_type = other RNA
acttggtgaggctggtaccctg

SEQ ID NO: 19505 - RNA, 22 nt, synthetic construct
  source 1..22: mol_type = other RNA
actttggctcttcacctttcta

SEQ ID NO: 19506 - RNA, 22 nt, synthetic construct
  source 1..22: mol_type = other RNA
agaaacacagccccaggtggag

SEQ ID NO: 19507 - RNA, 22 nt, synthetic construct
  source 1..22: mol_type = other RNA
agaaacggtggcccgtgtcagc

SEQ ID NO: 19508 - RNA, 22 nt, synthetic construct
  source 1..22: mol_type = other RNA
agaaactggccgggaatcaaga

SEQ ID NO: 19509 - RNA, 22 nt, synthetic construct
  source 1..22: mol_type = other RNA
agaaagagaaagggagtagagg

SEQ ID NO: 19510 - RNA, 22 nt, synthetic construct
  source 1..22: mol_type = other RNA
agaaagggagtagaggcggcca

SEQ ID NO: 19511 - RNA, 22 nt, synthetic construct
  source 1..22: mol_type = other RNA
agaaaggtgaagagccaaagtt

SEQ ID NO: 19512 - RNA, 22 nt, synthetic construct
  source 1..22: mol_type = other RNA
agaacctgagctgctctgacgc

SEQ ID NO: 19513 - RNA, 22 nt, synthetic construct
  source 1..22: mol_type = other RNA
agaactcaggaccaacttattc

SEQ ID NO: 19514 - RNA, 22 nt, synthetic construct
  source 1..22: mol_type = other RNA
agaacttgggaacagccacagc

SEQ ID NO: 19515 - RNA, 22 nt, synthetic construct
  source 1..22: mol_type = other RNA
agaagagctgggggcctgggct

SEQ ID NO: 19516 - RNA, 22 nt, synthetic construct
  source 1..22: mol_type = other RNA
agaagcaggggagctgggtttg

SEQ ID NO: 19517 - RNA, 22 nt, synthetic construct
  source 1..22: mol_type = other RNA
agaagcagtttggaaaaacaaa

SEQ ID NO: 19518 - RNA, 22 nt, synthetic construct
  source 1..22: mol_type = other RNA
agaagcccagagcagggcctta

SEQ ID NO: 19519 - RNA, 22 nt, synthetic construct
  source 1..22: mol_type = other RNA
agaagccccctcccttccccgt

SEQ ID NO: 19520 - RNA, 22 nt, synthetic construct
  source 1..22: mol_type = other RNA
agaaggatgcaggacgagaaac

SEQ ID NO: 19521 - RNA, 22 nt, synthetic construct
  source 1..22: mol_type = other RNA
agaaggatggagaaagagaaag

SEQ ID NO: 19522 - RNA, 22 nt, synthetic construct
  source 1..22: mol_type = other RNA
agaagggaatccctcctctctg

SEQ ID NO: 19523 - RNA, 22 nt, synthetic construct
  source 1..22: mol_type = other RNA
agaataagttggtcctgagttc

SEQ ID NO: 19524 - RNA, 22 nt, synthetic construct
  source 1..22: mol_type = other RNA
agaatccacccaaaaggcagcc

SEQ ID NO: 19525 - RNA, 22 nt, synthetic construct
  source 1..22: mol_type = other RNA
agaatcctggctccagcccctc

SEQ ID NO: 19526 - RNA, 22 nt, synthetic construct
  source 1..22: mol_type = other RNA
agaatgagaaacggtggcccgt

SEQ ID NO: 19527 - RNA, 22 nt, synthetic construct
  source 1..22: mol_type = other RNA
agaatggtgcgtcctaggtgtt

SEQ ID NO: 19528 - RNA, 22 nt, synthetic construct
  source 1..22: mol_type = other RNA
agacacggcaaaacccccgtca

SEQ ID NO: 19529 - RNA, 22 nt, synthetic construct
  source 1..22: mol_type = other RNA
agacagctgcacacctgtgtgc

SEQ ID NO: 19530 - RNA, 22 nt, synthetic construct
  source 1..22: mol_type = other RNA
agacagggctggggtggcctct

SEQ ID NO: 19531 - RNA, 22 nt, synthetic construct
  source 1..22: mol_type = other RNA
agacagtgaccaaccatccctg

SEQ ID NO: 19532 - RNA, 22 nt, synthetic construct
  source 1..22: mol_type = other RNA
agacccacgagtccaggcccca

SEQ ID NO: 19533 - RNA, 22 nt, synthetic construct
  source 1..22: mol_type = other RNA
agacccaggggtccaggcccag

SEQ ID NO: 19534 - RNA, 22 nt, synthetic construct
  source 1..22: mol_type = other RNA
agacctgacccaaacccagctc

SEQ ID NO: 19535 - RNA, 22 nt, synthetic construct
  source 1..22: mol_type = other RNA
agacggccgcgtcagagcagct

SEQ ID NO: 19536 - RNA, 22 nt, synthetic construct
  source 1..22: mol_type = other RNA
agactagggaagaggttccagc

SEQ ID NO: 19537 - RNA, 22 nt, synthetic construct
  source 1..22: mol_type = other RNA
agactcaggggcctgggcggga

SEQ ID NO: 19538 - RNA, 22 nt, synthetic construct
  source 1..22: mol_type = other RNA
agactgagccccgttcccctgc

SEQ ID NO: 19539 - RNA, 22 nt, synthetic construct
  source 1..22: mol_type = other RNA
agagaaagggagtagaggcggc

SEQ ID NO: 19540 - RNA, 22 nt, synthetic construct
  source 1..22: mol_type = other RNA
agagaagagctgggggcctggg

SEQ ID NO: 19541 - RNA, 22 nt, synthetic construct
  source 1..22: mol_type = other RNA
agagacagtgaccaaccatccc

SEQ ID NO: 19542 - RNA, 22 nt, synthetic construct
  source 1..22: mol_type = other RNA
agagaggagggattcccttctc

SEQ ID NO: 19543 - RNA, 22 nt, synthetic construct
  source 1..22: mol_type = other RNA
agagcaatgggcctttcccttt

SEQ ID NO: 19544 - RNA, 22 nt, synthetic construct
  source 1..22: mol_type = other RNA
agagcagagccaggaacccctg

SEQ ID NO: 19545 - RNA, 22 nt, synthetic construct
  source 1..22: mol_type = other RNA
agagcagctcaggttctgggag

SEQ ID NO: 19546 - RNA, 22 nt, synthetic construct
  source 1..22: mol_type = other RNA
agagcagggccttagggaagcg

SEQ ID NO: 19547 - RNA, 22 nt, synthetic construct
  source 1..22: mol_type = other RNA
agagcagggtcccgcttcccta

SEQ ID NO: 19548 - RNA, 22 nt, synthetic construct
  source 1..22: mol_type = other RNA
agagcatgaggtcatggaaact

SEQ ID NO: 19549 - RNA, 22 nt, synthetic construct
  source 1..22: mol_type = other RNA
agagccaaagttagaactcagg

SEQ ID NO: 19550 - RNA, 22 nt, synthetic construct
  source 1..22: mol_type = other RNA
agagccaggaacccctgtaggg

SEQ ID NO: 19551 - RNA, 22 nt, synthetic construct
  source 1..22: mol_type = other RNA
agagccaggagtcctggccccc

SEQ ID NO: 19552 - RNA, 22 nt, synthetic construct
  source 1..22: mol_type = other RNA
agagccaggggcatgagatggt

SEQ ID NO: 19553 - RNA, 22 nt, synthetic construct
  source 1..22: mol_type = other RNA
agagctgggggcctgggctcct

SEQ ID NO: 19554 - RNA, 22 nt, synthetic construct
  source 1..22: mol_type = other RNA
agaggagaagcagtttggaaaa

SEQ ID NO: 19555 - RNA, 22 nt, synthetic construct
  source 1..22: mol_type = other RNA
agaggagggattcccttctcag

SEQ ID NO: 19556 - RNA, 22 nt, synthetic construct
  source 1..22: mol_type = other RNA
agaggccaccccagccctgtct

SEQ ID NO: 19557 - RNA, 22 nt, synthetic construct
  source 1..22: mol_type = other RNA
agaggccccaggccacctactt

SEQ ID NO: 19558 - RNA, 22 nt, synthetic construct
  source 1..22: mol_type = other RNA
agaggcgctcaggcttccctgt

SEQ ID NO: 19559 - RNA, 22 nt, synthetic construct
  source 1..22: mol_type = other RNA
agaggcggccacgacctggtga

SEQ ID NO: 19560 - RNA, 22 nt, synthetic construct
  source 1..22: mol_type = other RNA
agaggctgggggcctggactcc

SEQ ID NO: 19561 - RNA, 22 nt, synthetic construct
  source 1..22: mol_type = other RNA
agaggctgttgggtcattttcc

SEQ ID NO: 19562 - RNA, 22 nt, synthetic construct
  source 1..22: mol_type = other RNA
agagggagccacgaaaacagat

SEQ ID NO: 19563 - RNA, 22 nt, synthetic construct
  source 1..22: mol_type = other RNA
agagggggcctcagtgaactgg

SEQ ID NO: 19564 - RNA, 22 nt, synthetic construct
  source 1..22: mol_type = other RNA
agaggggtgagacagctgcaca

SEQ ID NO: 19565 - RNA, 22 nt, synthetic construct
  source 1..22: mol_type = other RNA
agagggtagcgcagggtggcca

SEQ ID NO: 19566 - RNA, 22 nt, synthetic construct
  source 1..22: mol_type = other RNA
agaggtgagggacttggggggt

SEQ ID NO: 19567 - RNA, 22 nt, synthetic construct
  source 1..22: mol_type = other RNA
agaggttccagcccctcctcct

SEQ ID NO: 19568 - RNA, 22 nt, synthetic construct
  source 1..22: mol_type = other RNA
agagtaggaggggctggagcca

SEQ ID NO: 19569 - RNA, 22 nt, synthetic construct
  source 1..22: mol_type = other RNA
agagtatctgctggggtggttt

SEQ ID NO: 19570 - RNA, 22 nt, synthetic construct
  source 1..22: mol_type = other RNA
agagtcacccagagacagtgac

SEQ ID NO: 19571 - RNA, 22 nt, synthetic construct
  source 1..22: mol_type = other RNA
agagtccaggcccaacccctcc

SEQ ID NO: 19572 - RNA, 22 nt, synthetic construct
  source 1..22: mol_type = other RNA
agagtccccagtgctatctggg

SEQ ID NO: 19573 - RNA, 22 nt, synthetic construct
  source 1..22: mol_type = other RNA
agagtgagtttgccaagcagtc

SEQ ID NO: 19574 - RNA, 22 nt, synthetic construct
  source 1..22: mol_type = other RNA
agataaggccagtagccagccc

SEQ ID NO: 19575 - RNA, 22 nt, synthetic construct
  source 1..22: mol_type = other RNA
agatacgcctggttgcccagtg

SEQ ID NO: 19576 - RNA, 22 nt, synthetic construct
  source 1..22: mol_type = other RNA
agatactctgcaggaacgaagc

SEQ ID NO: 19577 - RNA, 22 nt, synthetic construct
  source 1..22: mol_type = other RNA
agatagcactggggactcttta

SEQ ID NO: 19578 - RNA, 22 nt, synthetic construct
  source 1..22: mol_type = other RNA
agatagccaggagtcctttcgt

SEQ ID NO: 19579 - RNA, 22 nt, synthetic construct
  source 1..22: mol_type = other RNA
agatccacgggataaattaccc

SEQ ID NO: 19580 - RNA, 22 nt, synthetic construct
  source 1..22: mol_type = other RNA
agatccagggacacggtgctag

SEQ ID NO: 19581 - RNA, 22 nt, synthetic construct
  source 1..22: mol_type = other RNA
agatgaaggagtccaggccccc

SEQ ID NO: 19582 - RNA, 22 nt, synthetic construct
  source 1..22: mol_type = other RNA
agatgagaagccccctcccttc

SEQ ID NO: 19583 - RNA, 22 nt, synthetic construct
  source 1..22: mol_type = other RNA
agatgcctgaggcctgggcacc

SEQ ID NO: 19584 - RNA, 22 nt, synthetic construct
  source 1..22: mol_type = other RNA
agatgggcagctttggagaggt

SEQ ID NO: 19585 - RNA, 22 nt, synthetic construct
  source 1..22: mol_type = other RNA
agatggtggacgaggaaggggg

SEQ ID NO: 19586 - RNA, 22 nt, synthetic construct
  source 1..22: mol_type = other RNA
agcaagtcgggactccagaggg

SEQ ID NO: 19587 - RNA, 22 nt, synthetic construct
  source 1..22: mol_type = other RNA
agcaatgggcctttccctttca

SEQ ID NO: 19588 - RNA, 22 nt, synthetic construct
  source 1..22: mol_type = other RNA
agcacagggtggccttcctcca

SEQ ID NO: 19589 - RNA, 22 nt, synthetic construct
  source 1..22: mol_type = other RNA
agcaccaggatcagtgaaacgc

SEQ ID NO: 19590 - RNA, 22 nt, synthetic construct
  source 1..22: mol_type = other RNA
agcaccgtgtccctggatctgt

SEQ ID NO: 19591 - RNA, 22 nt, synthetic construct
  source 1..22: mol_type = other RNA
agcactgaaaccctcagtccta

SEQ ID NO: 19592 - RNA, 22 nt, synthetic construct
  source 1..22: mol_type = other RNA
agcactgaaggcctggccggcc

SEQ ID NO: 19593 - RNA, 22 nt, synthetic construct
  source 1..22: mol_type = other RNA
agcactggaagcgccacctgtg

SEQ ID NO: 19594 - RNA, 22 nt, synthetic construct
  source 1..22: mol_type = other RNA
agcactggggactctttaagga

SEQ ID NO: 19595 - RNA, 22 nt, synthetic construct
  source 1..22: mol_type = other RNA
agcagagccaggaacccctgta

SEQ ID NO: 19596 - RNA, 22 nt, synthetic construct
  source 1..22: mol_type = other RNA
agcagatactctgcaggaacga

SEQ ID NO: 19597 - RNA, 22 nt, synthetic construct
  source 1..22: mol_type = other RNA
agcagctcaggttctgggagag

SEQ ID NO: 19598 - RNA, 22 nt, synthetic construct
  source 1..22: mol_type = other RNA
agcagggccttagggaagcggg

SEQ ID NO: 19599 - RNA, 22 nt, synthetic construct
  source 1..22: mol_type = other RNA
agcaggggagctgggtttgggt

SEQ ID NO: 19600 - RNA, 22 nt, synthetic construct
  source 1..22: mol_type = other RNA
agcaggggggcgatgcttgggg

SEQ ID NO: 19601 - RNA, 22 nt, synthetic construct
  source 1..22: mol_type = other RNA
agcagggtcccgcttccctaag

SEQ ID NO: 19602 - RNA, 22 nt, synthetic construct
  source 1..22: mol_type = other RNA
agcagtcaccccacagttggag

SEQ ID NO: 19603 - RNA, 22 nt, synthetic construct
  source 1..22: mol_type = other RNA
agcagtttggaaaaacaaaatc

SEQ ID NO: 19604 - RNA, 22 nt, synthetic construct
  source 1..22: mol_type = other RNA
agcataagctggtcaccccaca

SEQ ID NO: 19605 - RNA, 22 nt, synthetic construct
  source 1..22: mol_type = other RNA
agcatcgcccccctgctgtggc

SEQ ID NO: 19606 - RNA, 22 nt, synthetic construct
  source 1..22: mol_type = other RNA
agcatgaggtcatggaaactcg

SEQ ID NO: 19607 - RNA, 22 nt, synthetic construct
  source 1..22: mol_type = other RNA
agcattggggtgggctggggtt

SEQ ID NO: 19608 - RNA, 22 nt, synthetic construct
  source 1..22: mol_type = other RNA
agccaaagttagaactcaggac

SEQ ID NO: 19609 - RNA, 22 nt, synthetic construct
  source 1..22: mol_type = other RNA
agccacagcaggggggcgatgc

SEQ ID NO: 19610 - RNA, 22 nt, synthetic construct
  source 1..22: mol_type = other RNA
agccacgaaaacagatccaggg

SEQ ID NO: 19611 - RNA, 22 nt, synthetic construct
  source 1..22: mol_type = other RNA
agccacggtgtcccagcaagtc

SEQ ID NO: 19612 - RNA, 22 nt, synthetic construct
  source 1..22: mol_type = other RNA
agccactaaggcaattggggtg

SEQ ID NO: 19613 - RNA, 22 nt, synthetic construct
  source 1..22: mol_type = other RNA
agccagccccgtcctggcaggg

SEQ ID NO: 19614 - RNA, 22 nt, synthetic construct
  source 1..22: mol_type = other RNA
agccaggaacccctgtagggaa

SEQ ID NO: 19615 - RNA, 22 nt, synthetic construct
  source 1..22: mol_type = other RNA
agccaggagtcctggcccccag

SEQ ID NO: 19616 - RNA, 22 nt, synthetic construct
  source 1..22: mol_type = other RNA
agccaggagtcctttcgtggtt

SEQ ID NO: 19617 - RNA, 22 nt, synthetic construct
  source 1..22: mol_type = other RNA
agccaggattcttagggctgaa

SEQ ID NO: 19618 - RNA, 22 nt, synthetic construct
  source 1..22: mol_type = other RNA
agccaggggcatgagatggtgg

SEQ ID NO: 19619 - RNA, 22 nt, synthetic construct
  source 1..22: mol_type = other RNA
agccaggggctgacacgggcca

SEQ ID NO: 19620 - RNA, 22 nt, synthetic construct
  source 1..22: mol_type = other RNA
agccaggtccttccaagggtca

SEQ ID NO: 19621 - RNA, 22 nt, synthetic construct
  source 1..22: mol_type = other RNA
agccagtggccagaggctgttg

SEQ ID NO: 19622 - RNA, 22 nt, synthetic construct
  source 1..22: mol_type = other RNA
agcccacccagtgtccacaagg

SEQ ID NO: 19623 - RNA, 22 nt, synthetic construct
  source 1..22: mol_type = other RNA
agcccaccccaatgctccaggc

SEQ ID NO: 19624 - RNA, 22 nt, synthetic construct
  source 1..22: mol_type = other RNA
agcccagagcagggccttaggg

SEQ ID NO: 19625 - RNA, 22 nt, synthetic construct
  source 1..22: mol_type = other RNA
agcccaggagaggcgctcaggc

SEQ ID NO: 19626 - RNA, 22 nt, synthetic construct
  source 1..22: mol_type = other RNA
agcccaggcccccagctcttct

SEQ ID NO: 19627 - RNA, 22 nt, synthetic construct
  source 1..22: mol_type = other RNA
agccccaggtggagaaactggc

SEQ ID NO: 19628 - RNA, 22 nt, synthetic construct
  source 1..22: mol_type = other RNA
agcccccaaccccctagccact

SEQ ID NO: 19629 - RNA, 22 nt, synthetic construct
  source 1..22: mol_type = other RNA
agccccctcccttccccgttca

SEQ ID NO: 19630 - RNA, 22 nt, synthetic construct
  source 1..22: mol_type = other RNA
agccccgcctccctaagaccca

SEQ ID NO: 19631 - RNA, 22 nt, synthetic construct
  source 1..22: mol_type = other RNA
agccccgtcctggcagggctgt

SEQ ID NO: 19632 - RNA, 22 nt, synthetic construct
  source 1..22: mol_type = other RNA
agccccgttcccctgcatcccc

SEQ ID NO: 19633 - RNA, 22 nt, synthetic construct
  source 1..22: mol_type = other RNA
agcccctcctactctagccccc

SEQ ID NO: 19634 - RNA, 22 nt, synthetic construct
  source 1..22: mol_type = other RNA
agcccctcctccctcagaccca

SEQ ID NO: 19635 - RNA, 22 nt, synthetic construct
  source 1..22: mol_type = other RNA
agcccctcctccttcagagcca

SEQ ID NO: 19636 - RNA, 22 nt, synthetic construct
  source 1..22: mol_type = other RNA
agcccctcctctctcaaaccca

SEQ ID NO: 19637 - RNA, 22 nt, synthetic construct
  source 1..22: mol_type = other RNA
agcccctcctgccttaaaccca

SEQ ID NO: 19638 - RNA, 22 nt, synthetic construct
  source 1..22: mol_type = other RNA
agcccctggctgcagggccccg

SEQ ID NO: 19639 - RNA, 22 nt, synthetic construct
  source 1..22: mol_type = other RNA
agcccgagtttccatgacctca

SEQ ID NO: 19640 - RNA, 22 nt, synthetic construct
  source 1..22: mol_type = other RNA
agccctaagaatcctggctcca

SEQ ID NO: 19641 - RNA, 22 nt, synthetic construct
  source 1..22: mol_type = other RNA
agccctgccaggacggggctgg

SEQ ID NO: 19642 - RNA, 22 nt, synthetic construct
  source 1..22: mol_type = other RNA
agccctgggcccacggcttcgt

SEQ ID NO: 19643 - RNA, 22 nt, synthetic construct
  source 1..22: mol_type = other RNA
agccctgtctaccaggctgcct

SEQ ID NO: 19644 - RNA, 22 nt, synthetic construct
  source 1..22: mol_type = other RNA
agcccttccgccctcagatgaa

SEQ ID NO: 19645 - RNA, 22 nt, synthetic construct
  source 1..22: mol_type = other RNA
agccgaagtccagggggtcgga

SEQ ID NO: 19646 - RNA, 22 nt, synthetic construct
  source 1..22: mol_type = other RNA
agccgagttcatcccgttccca

SEQ ID NO: 19647 - RNA, 22 nt, synthetic construct
  source 1..22: mol_type = other RNA
agccgtgggcccagggctatgc

SEQ ID NO: 19648 - RNA, 22 nt, synthetic construct
  source 1..22: mol_type = other RNA
agcctagttttagcactgaaac

SEQ ID NO: 19649 - RNA, 22 nt, synthetic construct
  source 1..22: mol_type = other RNA
agcctcaccaagtggttgataa

SEQ ID NO: 19650 - RNA, 22 nt, synthetic construct
  source 1..22: mol_type = other RNA
agcctctccccattcagaccca

SEQ ID NO: 19651 - RNA, 22 nt, synthetic construct
  source 1..22: mol_type = other RNA
agcctctggccactggctgttt

SEQ ID NO: 19652 - RNA, 22 nt, synthetic construct
  source 1..22: mol_type = other RNA
agcctgagcgcctctcctgggc

SEQ ID NO: 19653 - RNA, 22 nt, synthetic construct
  source 1..22: mol_type = other RNA
agcctggggcccaggcacacag

SEQ ID NO: 19654 - RNA, 22 nt, synthetic construct
  source 1..22: mol_type = other RNA
agcctggtagacagggctgggg

SEQ ID NO: 19655 - RNA, 22 nt, synthetic construct
  source 1..22: mol_type = other RNA
agcgcagggtggccactgagaa

SEQ ID NO: 19656 - RNA, 22 nt, synthetic construct
  source 1..22: mol_type = other RNA
agcgccacctgtgggtggtgac

SEQ ID NO: 19657 - RNA, 22 nt, synthetic construct
  source 1..22: mol_type = other RNA
agcgcctctcctgggcttgcca

SEQ ID NO: 19658 - RNA, 22 nt, synthetic construct
  source 1..22: mol_type = other RNA
agcgggaccctgctctgggcgg

SEQ ID NO: 19659 - RNA, 22 nt, synthetic construct
  source 1..22: mol_type = other RNA
agctaaactcctagatccacgg

SEQ ID NO: 19660 - RNA, 22 nt, synthetic construct
  source 1..22: mol_type = other RNA
agctacgagggccaagagcatg

SEQ ID NO: 19661 - RNA, 22 nt, synthetic construct
  source 1..22: mol_type = other RNA
agctcaggttctgggagagggt

SEQ ID NO: 19662 - RNA, 22 nt, synthetic construct
  source 1..22: mol_type = other RNA
agctccagttcaggtcccggag

SEQ ID NO: 19663 - RNA, 22 nt, synthetic construct
  source 1..22: mol_type = other RNA
agctcccctgcttcttggccac

SEQ ID NO: 19664 - RNA, 22 nt, synthetic construct
  source 1..22: mol_type = other RNA
agctccctcccgcctcctccag

SEQ ID NO: 19665 - RNA, 22 nt, synthetic construct
  source 1..22: mol_type = other RNA
agctcggaaaccaccccagcag

SEQ ID NO: 19666 - RNA, 22 nt, synthetic construct
  source 1..22: mol_type = other RNA
agctcttctctgttcagcccta

SEQ ID NO: 19667 - RNA, 22 nt, synthetic construct
  source 1..22: mol_type = other RNA
agctgaggaaggagtgaagcta

SEQ ID NO: 19668 - RNA, 22 nt, synthetic construct
  source 1..22: mol_type = other RNA
agctgcacacctgtgtgcctgg

SEQ ID NO: 19669 - RNA, 22 nt, synthetic construct
  source 1..22: mol_type = other RNA
agctgcagcaccaggatcagtg

SEQ ID NO: 19670 - RNA, 22 nt, synthetic construct
  source 1..22: mol_type = other RNA
agctgcccatctggaggaggcg

SEQ ID NO: 19671 - RNA, 22 nt, synthetic construct
  source 1..22: mol_type = other RNA
agctgctctgacgcggccgtct

SEQ ID NO: 19672 - RNA, 22 nt, synthetic construct
  source 1..22: mol_type = other RNA
agctgggggcctgggctcctgg

SEQ ID NO: 19673 - RNA, 22 nt, synthetic construct
  source 1..22: mol_type = other RNA
agctgggtttgggtcaggtctg

SEQ ID NO: 19674 - RNA, 22 nt, synthetic construct
  source 1..22: mol_type = other RNA
agctggtcaccccacacccaga

SEQ ID NO: 19675 - RNA, 22 nt, synthetic construct
  source 1..22: mol_type = other RNA
agctgtctcacccctctgggag

SEQ ID NO: 19676 - RNA, 22 nt, synthetic construct
  source 1..22: mol_type = other RNA
agcttatgctgtttgcccagga

SEQ ID NO: 19677 - RNA, 22 nt, synthetic construct
  source 1..22: mol_type = other RNA
agcttcactccttcctcagctc

SEQ ID NO: 19678 - RNA, 22 nt, synthetic construct
  source 1..22: mol_type = other RNA
agcttccttacacttcccaaga

SEQ ID NO: 19679 - RNA, 22 nt, synthetic construct
  source 1..22: mol_type = other RNA
agcttgacccttggaaggacct

SEQ ID NO: 19680 - RNA, 22 nt, synthetic construct
  source 1..22: mol_type = other RNA
agctttggagaggtgagggact

SEQ ID NO: 19681 - RNA, 22 nt, synthetic construct
  source 1..22: mol_type = other RNA
aggaaaacagggatggttggtc

SEQ ID NO: 19682 - RNA, 22 nt, synthetic construct
  source 1..22: mol_type = other RNA
aggaaagaaggatggagaaaga

SEQ ID NO: 19683 - RNA, 22 nt, synthetic construct
  source 1..22: mol_type = other RNA
aggaacaatataaattggggac

SEQ ID NO: 19684 - RNA, 22 nt, synthetic construct
  source 1..22: mol_type = other RNA
aggaacccctgtagggaagggg

SEQ ID NO: 19685 - RNA, 22 nt, synthetic construct
  source 1..22: mol_type = other RNA
aggaacgaagccgtgggcccag

SEQ ID NO: 19686 - RNA, 22 nt, synthetic construct
  source 1..22: mol_type = other RNA
aggaagctgcagcaccaggatc

SEQ ID NO: 19687 - RNA, 22 nt, synthetic construct
  source 1..22: mol_type = other RNA
aggaaggagtgaagctaaactc

SEQ ID NO: 19688 - RNA, 22 nt, synthetic construct
  source 1..22: mol_type = other RNA
aggaaggccaccctgtgctggg

SEQ ID NO: 19689 - RNA, 22 nt, synthetic construct
  source 1..22: mol_type = other RNA
aggaagggggacagggaagcct

SEQ ID NO: 19690 - RNA, 22 nt, synthetic construct
  source 1..22: mol_type = other RNA
aggaagtgaacggggaagggag

SEQ ID NO: 19691 - RNA, 22 nt, synthetic construct
  source 1..22: mol_type = other RNA
aggaatatgtcccagatagcac

SEQ ID NO: 19692 - RNA, 22 nt, synthetic construct
  source 1..22: mol_type = other RNA
aggaatgggggcagggtaccag

SEQ ID NO: 19693 - RNA, 22 nt, synthetic construct
  source 1..22: mol_type = other RNA
aggacagcctagttttagcact

SEQ ID NO: 19694 - RNA, 22 nt, synthetic construct
  source 1..22: mol_type = other RNA
aggacagtggggaaaatgaccc

SEQ ID NO: 19695 - RNA, 22 nt, synthetic construct
  source 1..22: mol_type = other RNA
aggaccaacttattctgatttt

SEQ ID NO: 19696 - RNA, 22 nt, synthetic construct
  source 1..22: mol_type = other RNA
aggacctgcccagtacaggcat

SEQ ID NO: 19697 - RNA, 22 nt, synthetic construct
  source 1..22: mol_type = other RNA
aggacctggctgggtttaaggc

SEQ ID NO: 19698 - RNA, 22 nt, synthetic construct
  source 1..22: mol_type = other RNA
aggacgagaaacacagccccag

SEQ ID NO: 19699 - RNA, 22 nt, synthetic construct
  source 1..22: mol_type = other RNA
aggacgcaccattctcacaaag

SEQ ID NO: 19700 - RNA, 22 nt, synthetic construct
  source 1..22: mol_type = other RNA
aggacggggctggctactggcc

SEQ ID NO: 19701 - RNA, 22 nt, synthetic construct
  source 1..22: mol_type = other RNA
aggactcaaacccagaagccca

SEQ ID NO: 19702 - RNA, 22 nt, synthetic construct
  source 1..22: mol_type = other RNA
aggactcctggctatctgcaaa

SEQ ID NO: 19703 - RNA, 22 nt, synthetic construct
  source 1..22: mol_type = other RNA
aggactcctggctctgaaggag

SEQ ID NO: 19704 - RNA, 22 nt, synthetic construct
  source 1..22: mol_type = other RNA
aggactgagggtttcagtgcta

SEQ ID NO: 19705 - RNA, 22 nt, synthetic construct
  source 1..22: mol_type = other RNA
aggagaagcagtttggaaaaac

SEQ ID NO: 19706 - RNA, 22 nt, synthetic construct
  source 1..22: mol_type = other RNA
aggagaatccacccaaaaggca

SEQ ID NO: 19707 - RNA, 22 nt, synthetic construct
  source 1..22: mol_type = other RNA
aggagagcaatgggcctttccc

SEQ ID NO: 19708 - RNA, 22 nt, synthetic construct
  source 1..22: mol_type = other RNA
aggagagccaggggcatgagat

SEQ ID NO: 19709 - RNA, 22 nt, synthetic construct
  source 1..22: mol_type = other RNA
aggagaggcgctcaggcttccc

SEQ ID NO: 19710 - RNA, 22 nt, synthetic construct
  source 1..22: mol_type = other RNA
aggagcccaggcccccagctct

SEQ ID NO: 19711 - RNA, 22 nt, synthetic construct
  source 1..22: mol_type = other RNA
aggaggaggggctggaacctct

SEQ ID NO: 19712 - RNA, 22 nt, synthetic construct
  source 1..22: mol_type = other RNA
aggaggccaggccccagccctt

SEQ ID NO: 19713 - RNA, 22 nt, synthetic construct
  source 1..22: mol_type = other RNA
aggaggcctggagcattggggt

SEQ ID NO: 19714 - RNA, 22 nt, synthetic construct
  source 1..22: mol_type = other RNA
aggaggcgggagggagctacga

SEQ ID NO: 19715 - RNA, 22 nt, synthetic construct
  source 1..22: mol_type = other RNA
aggagggacttgccccaggcct

SEQ ID NO: 19716 - RNA, 22 nt, synthetic construct
  source 1..22: mol_type = other RNA
aggagggattcccttctcaggt

SEQ ID NO: 19717 - RNA, 22 nt, synthetic construct
  source 1..22: mol_type = other RNA
aggaggggctggaacctcttcc

SEQ ID NO: 19718 - RNA, 22 nt, synthetic construct
  source 1..22: mol_type = other RNA
aggaggggctggagccaggatt

SEQ ID NO: 19719 - RNA, 22 nt, synthetic construct
  source 1..22: mol_type = other RNA
aggaggggctggggcctggact

SEQ ID NO: 19720 - RNA, 22 nt, synthetic construct
  source 1..22: mol_type = other RNA
aggaggggctgggggccaggac

SEQ ID NO: 19721 - RNA, 22 nt, synthetic construct
  source 1..22: mol_type = other RNA
aggaggggggtgtccgtgtgga

SEQ ID NO: 19722 - RNA, 22 nt, synthetic construct
  source 1..22: mol_type = other RNA
aggagtccaggcccccagcctc

SEQ ID NO: 19723 - RNA, 22 nt, synthetic construct
  source 1..22: mol_type = other RNA
aggagtccaggcccccagtccc

SEQ ID NO: 19724 - RNA, 22 nt, synthetic construct
  source 1..22: mol_type = other RNA
aggagtcctggcccccagcccc

SEQ ID NO: 19725 - RNA, 22 nt, synthetic construct
  source 1..22: mol_type = other RNA
aggagtcctttcgtggtttcca

SEQ ID NO: 19726 - RNA, 22 nt, synthetic construct
  source 1..22: mol_type = other RNA
aggagtgaagctaaactcctag

SEQ ID NO: 19727 - RNA, 22 nt, synthetic construct
  source 1..22: mol_type = other RNA
aggagtttagcttcactccttc

SEQ ID NO: 19728 - RNA, 22 nt, synthetic construct
  source 1..22: mol_type = other RNA
aggatcagtgaaacgcaccaga

SEQ ID NO: 19729 - RNA, 22 nt, synthetic construct
  source 1..22: mol_type = other RNA
aggatgcaggacgagaaacaca

SEQ ID NO: 19730 - RNA, 22 nt, synthetic construct
  source 1..22: mol_type = other RNA
aggatggagaaagagaaaggga

SEQ ID NO: 19731 - RNA, 22 nt, synthetic construct
  source 1..22: mol_type = other RNA
aggattcttagggctgaacaga

SEQ ID NO: 19732 - RNA, 22 nt, synthetic construct
  source 1..22: mol_type = other RNA
aggcaattggggtgcaggaatg

SEQ ID NO: 19733 - RNA, 22 nt, synthetic construct
  source 1..22: mol_type = other RNA
aggcacacaggtgtgcagctgt

SEQ ID NO: 19734 - RNA, 22 nt, synthetic construct
  source 1..22: mol_type = other RNA
aggcagcctggtagacagggct

SEQ ID NO: 19735 - RNA, 22 nt, synthetic construct
  source 1..22: mol_type = other RNA
aggcaggaggggctgggggcca

SEQ ID NO: 19736 - RNA, 22 nt, synthetic construct
  source 1..22: mol_type = other RNA
aggcaggtccccaagcatcgcc

SEQ ID NO: 19737 - RNA, 22 nt, synthetic construct
  source 1..22: mol_type = other RNA
aggcatccctgtgaaagatgcc

SEQ ID NO: 19738 - RNA, 22 nt, synthetic construct
  source 1..22: mol_type = other RNA
aggcatctttcacagggatgcc

SEQ ID NO: 19739 - RNA, 22 nt, synthetic construct
  source 1..22: mol_type = other RNA
aggccaagtaggtggcctgggg

SEQ ID NO: 19740 - RNA, 22 nt, synthetic construct
  source 1..22: mol_type = other RNA
aggccaccccagccctgtctac

SEQ ID NO: 19741 - RNA, 22 nt, synthetic construct
  source 1..22: mol_type = other RNA
aggccaccctgtgctgggacag

SEQ ID NO: 19742 - RNA, 22 nt, synthetic construct
  source 1..22: mol_type = other RNA
aggccacctacttggcctggac

SEQ ID NO: 19743 - RNA, 22 nt, synthetic construct
  source 1..22: mol_type = other RNA
aggccaggccccagcccttccg

SEQ ID NO: 19744 - RNA, 22 nt, synthetic construct
  source 1..22: mol_type = other RNA
aggccagtagccagccccgtcc

SEQ ID NO: 19745 - RNA, 22 nt, synthetic construct
  source 1..22: mol_type = other RNA
aggcccaacccctccccattca

SEQ ID NO: 19746 - RNA, 22 nt, synthetic construct
  source 1..22: mol_type = other RNA
aggcccagccccgcctccctaa

SEQ ID NO: 19747 - RNA, 22 nt, synthetic construct
  source 1..22: mol_type = other RNA
aggcccattgctctccttgccc

SEQ ID NO: 19748 - RNA, 22 nt, synthetic construct
  source 1..22: mol_type = other RNA
aggccccagcccctcctctctc

SEQ ID NO: 19749 - RNA, 22 nt, synthetic construct
  source 1..22: mol_type = other RNA
aggccccagcccttccgccctc

SEQ ID NO: 19750 - RNA, 22 nt, synthetic construct
  source 1..22: mol_type = other RNA
aggccccaggccacctacttgg

SEQ ID NO: 19751 - RNA, 22 nt, synthetic construct
  source 1..22: mol_type = other RNA
aggcccccagcctctccccatt

SEQ ID NO: 19752 - RNA, 22 nt, synthetic construct
  source 1..22: mol_type = other RNA
aggcccccagctcttctctgtt

SEQ ID NO: 19753 - RNA, 22 nt, synthetic construct
  source 1..22: mol_type = other RNA
aggcccccagtccctccaccct

SEQ ID NO: 19754 - RNA, 22 nt, synthetic construct
  source 1..22: mol_type = other RNA
aggccccctctgcacggggccc

SEQ ID NO: 19755 - RNA, 22 nt, synthetic construct
  source 1..22: mol_type = other RNA
aggcccctgagtctgtcccagc

SEQ ID NO: 19756 - RNA, 22 nt, synthetic construct
  source 1..22: mol_type = other RNA
aggccctgctctgggcttctgg

SEQ ID NO: 19757 - RNA, 22 nt, synthetic construct
  source 1..22: mol_type = other RNA
aggccggccaggccttcagtgc

SEQ ID NO: 19758 - RNA, 22 nt, synthetic construct
  source 1..22: mol_type = other RNA
aggcctcaggcatctttcacag

SEQ ID NO: 19759 - RNA, 22 nt, synthetic construct
  source 1..22: mol_type = other RNA
aggcctcctgggataccccgaa

SEQ ID NO: 19760 - RNA, 22 nt, synthetic construct
  source 1..22: mol_type = other RNA
aggcctggagcattggggtggg

SEQ ID NO: 19761 - RNA, 22 nt, synthetic construct
  source 1..22: mol_type = other RNA
aggcctggccggcctgaccact

SEQ ID NO: 19762 - RNA, 22 nt, synthetic construct
  source 1..22: mol_type = other RNA
aggcctgggcaccagggactcc

SEQ ID NO: 19763 - RNA, 22 nt, synthetic construct
  source 1..22: mol_type = other RNA
aggcctggggcaagtccctcct

SEQ ID NO: 19764 - RNA, 22 nt, synthetic construct
  source 1..22: mol_type = other RNA
aggccttcagtgctcagtggaa

SEQ ID NO: 19765 - RNA, 22 nt, synthetic construct
  source 1..22: mol_type = other RNA
aggccttgtggacactgggtgg

SEQ ID NO: 19766 - RNA, 22 nt, synthetic construct
  source 1..22: mol_type = other RNA
aggcgctcaggcttccctgtcc

SEQ ID NO: 19767 - RNA, 22 nt, synthetic construct
  source 1..22: mol_type = other RNA
aggcggccacgacctggtgaac

SEQ ID NO: 19768 - RNA, 22 nt, synthetic construct
  source 1..22: mol_type = other RNA
aggcgggagggagctacgaggg

SEQ ID NO: 19769 - RNA, 22 nt, synthetic construct
  source 1..22: mol_type = other RNA
aggcggggctgggcctggaccc

SEQ ID NO: 19770 - RNA, 22 nt, synthetic construct
  source 1..22: mol_type = other RNA
aggcgtatcttaaacagccagt

SEQ ID NO: 19771 - RNA, 22 nt, synthetic construct
  source 1..22: mol_type = other RNA
aggctgccttttgggtggattc

SEQ ID NO: 19772 - RNA, 22 nt, synthetic construct
  source 1..22: mol_type = other RNA
aggctgggggcctggactcctt

SEQ ID NO: 19773 - RNA, 22 nt, synthetic construct
  source 1..22: mol_type = other RNA
aggctggtaccctgcccccatt

SEQ ID NO: 19774 - RNA, 22 nt, synthetic construct
  source 1..22: mol_type = other RNA
aggctgtcacactccagttcac

SEQ ID NO: 19775 - RNA, 22 nt, synthetic construct
  source 1..22: mol_type = other RNA
aggctgtcctgggcaaacagca

SEQ ID NO: 19776 - RNA, 22 nt, synthetic construct
  source 1..22: mol_type = other RNA
aggctgttgggtcattttcccc

SEQ ID NO: 19777 - RNA, 22 nt, synthetic construct
  source 1..22: mol_type = other RNA
aggcttccctgtcccccttcct

SEQ ID NO: 19778 - RNA, 22 nt, synthetic construct
  source 1..22: mol_type = other RNA
agggaaaggcccattgctctcc

SEQ ID NO: 19779 - RNA, 22 nt, synthetic construct
  source 1..22: mol_type = other RNA
agggaagaatgagaaacggtgg

SEQ ID NO: 19780 - RNA, 22 nt, synthetic construct
  source 1..22: mol_type = other RNA
agggaagaggttccagcccctc

SEQ ID NO: 19781 - RNA, 22 nt, synthetic construct
  source 1..22: mol_type = other RNA
agggaagcctgagcgcctctcc

SEQ ID NO: 19782 - RNA, 22 nt, synthetic construct
  source 1..22: mol_type = other RNA
agggaagcgggaccctgctctg

SEQ ID NO: 19783 - RNA, 22 nt, synthetic construct
  source 1..22: mol_type = other RNA
agggaaggggcaggagagccag

SEQ ID NO: 19784 - RNA, 22 nt, synthetic construct
  source 1..22: mol_type = other RNA
agggaatccctcctctctgaac

SEQ ID NO: 19785 - RNA, 22 nt, synthetic construct
  source 1..22: mol_type = other RNA
agggacacggtgctaggacagt

SEQ ID NO: 19786 - RNA, 22 nt, synthetic construct
  source 1..22: mol_type = other RNA
agggactccagagtccaggccc

SEQ ID NO: 19787 - RNA, 22 nt, synthetic construct
  source 1..22: mol_type = other RNA
agggactgggggcctggactcc

SEQ ID NO: 19788 - RNA, 22 nt, synthetic construct
  source 1..22: mol_type = other RNA
agggacttgccccaggccttgt

SEQ ID NO: 19789 - RNA, 22 nt, synthetic construct
  source 1..22: mol_type = other RNA
agggacttggggggtaatttat

SEQ ID NO: 19790 - RNA, 22 nt, synthetic construct
  source 1..22: mol_type = other RNA
agggagccacgaaaacagatcc

SEQ ID NO: 19791 - RNA, 22 nt, synthetic construct
  source 1..22: mol_type = other RNA
agggagctacgagggccaagag

SEQ ID NO: 19792 - RNA, 22 nt, synthetic construct
  source 1..22: mol_type = other RNA
agggaggaggggctggggcctg

SEQ ID NO: 19793 - RNA, 22 nt, synthetic construct
  source 1..22: mol_type = other RNA
agggaggcggggctgggcctgg

SEQ ID NO: 19794 - RNA, 22 nt, synthetic construct
  source 1..22: mol_type = other RNA
agggagggggcttctcatctgg

SEQ ID NO: 19795 - RNA, 22 nt, synthetic construct
  source 1..22: mol_type = other RNA
agggagtagaggcggccacgac

SEQ ID NO: 19796 - RNA, 22 nt, synthetic construct
  source 1..22: mol_type = other RNA
agggagttttccacacggacac

SEQ ID NO: 19797 - RNA, 22 nt, synthetic construct
  source 1..22: mol_type = other RNA
agggatgcctgtactgggcagg

SEQ ID NO: 19798 - RNA, 22 nt, synthetic construct
  source 1..22: mol_type = other RNA
agggatggttggtcactgtctc

SEQ ID NO: 19799 - RNA, 22 nt, synthetic construct
  source 1..22: mol_type = other RNA
agggattcccttctcaggttac

SEQ ID NO: 19800 - RNA, 22 nt, synthetic construct
  source 1..22: mol_type = other RNA
agggcacgtgcggccccttcac

SEQ ID NO: 19801 - RNA, 22 nt, synthetic construct
  source 1..22: mol_type = other RNA
agggccaagagcatgaggtcat

SEQ ID NO: 19802 - RNA, 22 nt, synthetic construct
  source 1..22: mol_type = other RNA
agggccccgtgcagagggggcc

SEQ ID NO: 19803 - RNA, 22 nt, synthetic construct
  source 1..22: mol_type = other RNA
agggccttagggaagcgggacc

SEQ ID NO: 19804 - RNA, 22 nt, synthetic construct
  source 1..22: mol_type = other RNA
agggcggaagggctggggcctg

SEQ ID NO: 19805 - RNA, 22 nt, synthetic construct
  source 1..22: mol_type = other RNA
agggctatgcagggtggaggaa

SEQ ID NO: 19806 - RNA, 22 nt, synthetic construct
  source 1..22: mol_type = other RNA
agggctgaacagagaagagctg

SEQ ID NO: 19807 - RNA, 22 nt, synthetic construct
  source 1..22: mol_type = other RNA
agggctggggcctggcctcctg

SEQ ID NO: 19808 - RNA, 22 nt, synthetic construct
  source 1..22: mol_type = other RNA
agggctggggtggcctctcgtg

SEQ ID NO: 19809 - RNA, 22 nt, synthetic construct
  source 1..22: mol_type = other RNA
agggctgtggtgaggagggggg

SEQ ID NO: 19810 - RNA, 22 nt, synthetic construct
  source 1..22: mol_type = other RNA
aggggaacggggatgcagggga

SEQ ID NO: 19811 - RNA, 22 nt, synthetic construct
  source 1..22: mol_type = other RNA
aggggaacggggctcagtctga

SEQ ID NO: 19812 - RNA, 22 nt, synthetic construct
  source 1..22: mol_type = other RNA
aggggaagggggatgcagggga

SEQ ID NO: 19813 - RNA, 22 nt, synthetic construct
  source 1..22: mol_type = other RNA
aggggagctgggtttgggtcag

SEQ ID NO: 19814 - RNA, 22 nt, synthetic construct
  source 1..22: mol_type = other RNA
aggggaggggggcaaggagagc

SEQ ID NO: 19815 - RNA, 22 nt, synthetic construct
  source 1..22: mol_type = other RNA
aggggcaggagagccaggggca

SEQ ID NO: 19816 - RNA, 22 nt, synthetic construct
  source 1..22: mol_type = other RNA
aggggcatgagatggtggacga

SEQ ID NO: 19817 - RNA, 22 nt, synthetic construct
  source 1..22: mol_type = other RNA
aggggccgcacgtgccctggga

SEQ ID NO: 19818 - RNA, 22 nt, synthetic construct
  source 1..22: mol_type = other RNA
aggggcctgggcgggactccca

SEQ ID NO: 19819 - RNA, 22 nt, synthetic construct
  source 1..22: mol_type = other RNA
aggggctgacacgggccaccgt

SEQ ID NO: 19820 - RNA, 22 nt, synthetic construct
  source 1..22: mol_type = other RNA
aggggctggaacctcttcccta

SEQ ID NO: 19821 - RNA, 22 nt, synthetic construct
  source 1..22: mol_type = other RNA
aggggctggagccaggattctt

SEQ ID NO: 19822 - RNA, 22 nt, synthetic construct
  source 1..22: mol_type = other RNA
aggggctggggcctggactcct

SEQ ID NO: 19823 - RNA, 22 nt, synthetic construct
  source 1..22: mol_type = other RNA
aggggctggggcctggactcgt

SEQ ID NO: 19824 - RNA, 22 nt, synthetic construct
  source 1..22: mol_type = other RNA
aggggctgggggccaggactcc

SEQ ID NO: 19825 - RNA, 22 nt, synthetic construct
  source 1..22: mol_type = other RNA
aggggctgggggcctggacttc

SEQ ID NO: 19826 - RNA, 22 nt, synthetic construct
  source 1..22: mol_type = other RNA
agggggacagggaagcctgagc

SEQ ID NO: 19827 - RNA, 22 nt, synthetic construct
  source 1..22: mol_type = other RNA
agggggatgcaggggaacgggg

SEQ ID NO: 19828 - RNA, 22 nt, synthetic construct
  source 1..22: mol_type = other RNA
agggggcctcagtgaactggag

SEQ ID NO: 19829 - RNA, 22 nt, synthetic construct
  source 1..22: mol_type = other RNA
agggggcttctcatctgggtgc

SEQ ID NO: 19830 - RNA, 22 nt, synthetic construct
  source 1..22: mol_type = other RNA
aggggggcaaggagagcaatgg

SEQ ID NO: 19831 - RNA, 22 nt, synthetic construct
  source 1..22: mol_type = other RNA
aggggggcgatgcttggggacc

SEQ ID NO: 19832 - RNA, 22 nt, synthetic construct
  source 1..22: mol_type = other RNA
aggggggtgtccgtgtggaaaa

SEQ ID NO: 19833 - RNA, 22 nt, synthetic construct
  source 1..22: mol_type = other RNA
agggggtcggaggagggacttg

SEQ ID NO: 19834 - RNA, 22 nt, synthetic construct
  source 1..22: mol_type = other RNA
agggggttgggggctagagtag

SEQ ID NO: 19835 - RNA, 22 nt, synthetic construct
  source 1..22: mol_type = other RNA
aggggtccaaaacttgggggga

SEQ ID NO: 19836 - RNA, 22 nt, synthetic construct
  source 1..22: mol_type = other RNA
aggggtccaggcccagccccgc

SEQ ID NO: 19837 - RNA, 22 nt, synthetic construct
  source 1..22: mol_type = other RNA
aggggtgagacagctgcacacc

SEQ ID NO: 19838 - RNA, 22 nt, synthetic construct
  source 1..22: mol_type = other RNA
aggggttcctggctctgctctt

SEQ ID NO: 19839 - RNA, 22 nt, synthetic construct
  source 1..22: mol_type = other RNA
aggggttgggcctggactctgg

SEQ ID NO: 19840 - RNA, 22 nt, synthetic construct
  source 1..22: mol_type = other RNA
agggtaccagcctcaccaagtg

SEQ ID NO: 19841 - RNA, 22 nt, synthetic construct
  source 1..22: mol_type = other RNA
agggtaccccacgtgggtttat

SEQ ID NO: 19842 - RNA, 22 nt, synthetic construct
  source 1..22: mol_type = other RNA
agggtagcgcagggtggccact

SEQ ID NO: 19843 - RNA, 22 nt, synthetic construct
  source 1..22: mol_type = other RNA
agggtcaagctcggaaaccacc

SEQ ID NO: 19844 - RNA, 22 nt, synthetic construct
  source 1..22: mol_type = other RNA
agggtcccgcttccctaaggcc

SEQ ID NO: 19845 - RNA, 22 nt, synthetic construct
  source 1..22: mol_type = other RNA
agggtggaggaaggccaccctg

SEQ ID NO: 19846 - RNA, 22 nt, synthetic construct
  source 1..22: mol_type = other RNA
agggtggagggactgggggcct

SEQ ID NO: 19847 - RNA, 22 nt, synthetic construct
  source 1..22: mol_type = other RNA
agggtggccactgagaaccggg

SEQ ID NO: 19848 - RNA, 22 nt, synthetic construct
  source 1..22: mol_type = other RNA
agggtggccttcctccaccctg

SEQ ID NO: 19849 - RNA, 22 nt, synthetic construct
  source 1..22: mol_type = other RNA
agggtttcagtgctaaaactag

SEQ ID NO: 19850 - RNA, 22 nt, synthetic construct
  source 1..22: mol_type = other RNA
aggtaaaactgacgcacggagg

SEQ ID NO: 19851 - RNA, 22 nt, synthetic construct
  source 1..22: mol_type = other RNA
aggtaccatgtggggttcccgc

SEQ ID NO: 19852 - RNA, 22 nt, synthetic construct
  source 1..22: mol_type = other RNA
aggtcatggaaactcgggctgt

SEQ ID NO: 19853 - RNA, 22 nt, synthetic construct
  source 1..22: mol_type = other RNA
aggtccccaagcatcgcccccc

SEQ ID NO: 19854 - RNA, 22 nt, synthetic construct
  source 1..22: mol_type = other RNA
aggtcccggagcccacccagtg

SEQ ID NO: 19855 - RNA, 22 nt, synthetic construct
  source 1..22: mol_type = other RNA
aggtccttccaagggtcaagct

SEQ ID NO: 19856 - RNA, 22 nt, synthetic construct
  source 1..22: mol_type = other RNA
aggtccttgaaagggaaaggcc

SEQ ID NO: 19857 - RNA, 22 nt, synthetic construct
  source 1..22: mol_type = other RNA
aggtcgtggccgcctctactcc

SEQ ID NO: 19858 - RNA, 22 nt, synthetic construct
  source 1..22: mol_type = other RNA
aggtctgggtgtggggtgacca

SEQ ID NO: 19859 - RNA, 22 nt, synthetic construct
  source 1..22: mol_type = other RNA
aggtgaagagccaaagttagaa

SEQ ID NO: 19860 - RNA, 22 nt, synthetic construct
  source 1..22: mol_type = other RNA
aggtgagggacttggggggtaa

SEQ ID NO: 19861 - RNA, 22 nt, synthetic construct
  source 1..22: mol_type = other RNA
aggtggagaaactggccgggaa

SEQ ID NO: 19862 - RNA, 22 nt, synthetic construct
  source 1..22: mol_type = other RNA
aggtggcctggggcctctgggg

SEQ ID NO: 19863 - RNA, 22 nt, synthetic construct
  source 1..22: mol_type = other RNA
aggtggcgcttccagtgctcag

SEQ ID NO: 19864 - RNA, 22 nt, synthetic construct
  source 1..22: mol_type = other RNA
aggtgtgcagctgtctcacccc

SEQ ID NO: 19865 - RNA, 22 nt, synthetic construct
  source 1..22: mol_type = other RNA
aggtgttcaccaggtcgtggcc

SEQ ID NO: 19866 - RNA, 22 nt, synthetic construct
  source 1..22: mol_type = other RNA
aggttacgtggccaagaagcag

SEQ ID NO: 19867 - RNA, 22 nt, synthetic construct
  source 1..22: mol_type = other RNA
aggttccagcccctcctccttc

SEQ ID NO: 19868 - RNA, 22 nt, synthetic construct
  source 1..22: mol_type = other RNA
aggttctgggagagggtagcgc

SEQ ID NO: 19869 - RNA, 22 nt, synthetic construct
  source 1..22: mol_type = other RNA
agtacaggcatccctgtgaaag

SEQ ID NO: 19870 - RNA, 22 nt, synthetic construct
  source 1..22: mol_type = other RNA
agtagaggcggccacgacctgg

SEQ ID NO: 19871 - RNA, 22 nt, synthetic construct
  source 1..22: mol_type = other RNA
agtagccagccccgtcctggca

SEQ ID NO: 19872 - RNA, 22 nt, synthetic construct
  source 1..22: mol_type = other RNA
agtaggaggggctggagccagg

SEQ ID NO: 19873 - RNA, 22 nt, synthetic construct
  source 1..22: mol_type = other RNA
agtaggtggcctggggcctctg

SEQ ID NO: 19874 - RNA, 22 nt, synthetic construct
  source 1..22: mol_type = other RNA
agtatctgctggggtggtttcc

SEQ ID NO: 19875 - RNA, 22 nt, synthetic construct
  source 1..22: mol_type = other RNA
agtcacccagagacagtgacca

SEQ ID NO: 19876 - RNA, 22 nt, synthetic construct
  source 1..22: mol_type = other RNA
agtcaccccacagttggaggag

SEQ ID NO: 19877 - RNA, 22 nt, synthetic construct
  source 1..22: mol_type = other RNA
agtccaggcccaacccctcccc

SEQ ID NO: 19878 - RNA, 22 nt, synthetic construct
  source 1..22: mol_type = other RNA
agtccaggccccagcccctcct

SEQ ID NO: 19879 - RNA, 22 nt, synthetic construct
  source 1..22: mol_type = other RNA
agtccaggcccccagcctctcc

SEQ ID NO: 19880 - RNA, 22 nt, synthetic construct
  source 1..22: mol_type = other RNA
agtccaggcccccagtccctcc

SEQ ID NO: 19881 - RNA, 22 nt, synthetic construct
  source 1..22: mol_type = other RNA
agtccagggggtcggaggaggg

SEQ ID NO: 19882 - RNA, 22 nt, synthetic construct
  source 1..22: mol_type = other RNA
agtccccaatttatattgttcc

SEQ ID NO: 19883 - RNA, 22 nt, synthetic construct
  source 1..22: mol_type = other RNA
agtccccagtgctatctgggac

SEQ ID NO: 19884 - RNA, 22 nt, synthetic construct
  source 1..22: mol_type = other RNA
agtcccgcccaggcccctgagt

SEQ ID NO: 19885 - RNA, 22 nt, synthetic construct
  source 1..22: mol_type = other RNA
agtccctcacctctccaaagct

SEQ ID NO: 19886 - RNA, 22 nt, synthetic construct
  source 1..22: mol_type = other RNA
agtccctccaccctcagaccca

SEQ ID NO: 19887 - RNA, 22 nt, synthetic construct
  source 1..22: mol_type = other RNA
agtccctcctccgaccccctgg

SEQ ID NO: 19888 - RNA, 22 nt, synthetic construct
  source 1..22: mol_type = other RNA
agtccctggtgcccaggcctca

SEQ ID NO: 19889 - RNA, 22 nt, synthetic construct
  source 1..22: mol_type = other RNA
agtcctaggaaaacagggatgg

SEQ ID NO: 19890 - RNA, 22 nt, synthetic construct
  source 1..22: mol_type = other RNA
agtcctggcccccagcccctcc

SEQ ID NO: 19891 - RNA, 22 nt, synthetic construct
  source 1..22: mol_type = other RNA
agtccttggcaagcccaggaga

SEQ ID NO: 19892 - RNA, 22 nt, synthetic construct
  source 1..22: mol_type = other RNA
agtcctttcgtggtttccactg

SEQ ID NO: 19893 - RNA, 22 nt, synthetic construct
  source 1..22: mol_type = other RNA
agtcgggactccagagggagcc

SEQ ID NO: 19894 - RNA, 22 nt, synthetic construct
  source 1..22: mol_type = other RNA
agtctgaagagcagagccagga

SEQ ID NO: 19895 - RNA, 22 nt, synthetic construct
  source 1..22: mol_type = other RNA
agtctgagcactggaagcgcca

SEQ ID NO: 19896 - RNA, 22 nt, synthetic construct
  source 1..22: mol_type = other RNA
agtctgtcccagcacagggtgg

SEQ ID NO: 19897 - RNA, 22 nt, synthetic construct
  source 1..22: mol_type = other RNA
agtgaaacgcaccagacggccg

SEQ ID NO: 19898 - RNA, 22 nt, synthetic construct
  source 1..22: mol_type = other RNA
agtgaacggggaagggaggggg

SEQ ID NO: 19899 - RNA, 22 nt, synthetic construct
  source 1..22: mol_type = other RNA
agtgaactggagtgtgacagcc

SEQ ID NO: 19900 - RNA, 22 nt, synthetic construct
  source 1..22: mol_type = other RNA
agtgaagctaaactcctagatc

SEQ ID NO: 19901 - RNA, 22 nt, synthetic construct
  source 1..22: mol_type = other RNA
agtgaccaaccatccctgtttt

SEQ ID NO: 19902 - RNA, 22 nt, synthetic construct
  source 1..22: mol_type = other RNA
agtgagtttgccaagcagtcac

SEQ ID NO: 19903 - RNA, 22 nt, synthetic construct
  source 1..22: mol_type = other RNA
agtgctaaaactaggctgtcct

SEQ ID NO: 19904 - RNA, 22 nt, synthetic construct
  source 1..22: mol_type = other RNA
agtgctatctgggacatattcc

SEQ ID NO: 19905 - RNA, 22 nt, synthetic construct
  source 1..22: mol_type = other RNA
agtgctcagactagggaagagg

SEQ ID NO: 19906 - RNA, 22 nt, synthetic construct
  source 1..22: mol_type = other RNA
agtgctcagtggaaaccacgaa

SEQ ID NO: 19907 - RNA, 22 nt, synthetic construct
  source 1..22: mol_type = other RNA
agtggaaaccacgaaaggactc

SEQ ID NO: 19908 - RNA, 22 nt, synthetic construct
  source 1..22: mol_type = other RNA
agtggccaccctgcgctaccct

SEQ ID NO: 19909 - RNA, 22 nt, synthetic construct
  source 1..22: mol_type = other RNA
agtggccagaggctgttgggtc

SEQ ID NO: 19910 - RNA, 22 nt, synthetic construct
  source 1..22: mol_type = other RNA
agtggctagggggttgggggct

SEQ ID NO: 19911 - RNA, 22 nt, synthetic construct
  source 1..22: mol_type = other RNA
agtggggaaaatgacccaacag

SEQ ID NO: 19912 - RNA, 22 nt, synthetic construct
  source 1..22: mol_type = other RNA
agtggtcaggccggccaggcct

SEQ ID NO: 19913 - RNA, 22 nt, synthetic construct
  source 1..22: mol_type = other RNA
agtggttgataaacccacgtgg

SEQ ID NO: 19914 - RNA, 22 nt, synthetic construct
  source 1..22: mol_type = other RNA
agtgtaaggaagctgcagcacc

SEQ ID NO: 19915 - RNA, 22 nt, synthetic construct
  source 1..22: mol_type = other RNA
agtgtccacaaggcctggggca

SEQ ID NO: 19916 - RNA, 22 nt, synthetic construct
  source 1..22: mol_type = other RNA
agtgtgacagcctggggcccag

SEQ ID NO: 19917 - RNA, 22 nt, synthetic construct
  source 1..22: mol_type = other RNA
agttagaactcaggaccaactt

SEQ ID NO: 19918 - RNA, 22 nt, synthetic construct
  source 1..22: mol_type = other RNA
agttcactgaggccccctctgc

SEQ ID NO: 19919 - RNA, 22 nt, synthetic construct
  source 1..22: mol_type = other RNA
agttcaggtcccggagcccacc

SEQ ID NO: 19920 - RNA, 22 nt, synthetic construct
  source 1..22: mol_type = other RNA
agttcatcccgttcccagggca

SEQ ID NO: 19921 - RNA, 22 nt, synthetic construct
  source 1..22: mol_type = other RNA
agttctaactttggctcttcac

SEQ ID NO: 19922 - RNA, 22 nt, synthetic construct
  source 1..22: mol_type = other RNA
agttcttagggtaccccacgtg

SEQ ID NO: 19923 - RNA, 22 nt, synthetic construct
  source 1..22: mol_type = other RNA
agttggaggagaatccacccaa

SEQ ID NO: 19924 - RNA, 22 nt, synthetic construct
  source 1..22: mol_type = other RNA
agttggtcctgagttctaactt

SEQ ID NO: 19925 - RNA, 22 nt, synthetic construct
  source 1..22: mol_type = other RNA
agttgtcatggcgataggggag

SEQ ID NO: 19926 - RNA, 22 nt, synthetic construct
  source 1..22: mol_type = other RNA
agtttagcttcactccttcctc

SEQ ID NO: 19927 - RNA, 22 nt, synthetic construct
  source 1..22: mol_type = other RNA
agtttccatgacctcatgctct

SEQ ID NO: 19928 - RNA, 22 nt, synthetic construct
  source 1..22: mol_type = other RNA
agtttctccacctggggctgtg

SEQ ID NO: 19929 - RNA, 22 nt, synthetic construct
  source 1..22: mol_type = other RNA
agtttgccaagcagtcacccca

SEQ ID NO: 19930 - RNA, 22 nt, synthetic construct
  source 1..22: mol_type = other RNA
agtttggaaaaacaaaatcaga

SEQ ID NO: 19931 - RNA, 22 nt, synthetic construct
  source 1..22: mol_type = other RNA
agttttacctgtgagataaggc

SEQ ID NO: 19932 - RNA, 22 nt, synthetic construct
  source 1..22: mol_type = other RNA
agttttagcactgaaaccctca

SEQ ID NO: 19933 - RNA, 22 nt, synthetic construct
  source 1..22: mol_type = other RNA
agttttccacacggacaccccc

SEQ ID NO: 19934 - RNA, 22 nt, synthetic construct
  source 1..22: mol_type = other RNA
agttttggacccctaagggaag

SEQ ID NO: 19935 - RNA, 22 nt, synthetic construct
  source 1..22: mol_type = other RNA
ataaacccacgtggggtaccct

SEQ ID NO: 19936 - RNA, 22 nt, synthetic construct
  source 1..22: mol_type = other RNA
ataaacgagccgagttcatccc

SEQ ID NO: 19937 - RNA, 22 nt, synthetic construct
  source 1..22: mol_type = other RNA
ataaattaccccccaagtccct

SEQ ID NO: 19938 - RNA, 22 nt, synthetic construct
  source 1..22: mol_type = other RNA
ataaattggggactagaaaggt

SEQ ID NO: 19939 - RNA, 22 nt, synthetic construct
  source 1..22: mol_type = other RNA
ataagctggtcaccccacaccc

SEQ ID NO: 19940 - RNA, 22 nt, synthetic construct
  source 1..22: mol_type = other RNA
ataaggccagtagccagccccg

SEQ ID NO: 19941 - RNA, 22 nt, synthetic construct
  source 1..22: mol_type = other RNA
ataagttggtcctgagttctaa

SEQ ID NO: 19942 - RNA, 22 nt, synthetic construct
  source 1..22: mol_type = other RNA
ataccccgaagagtgagtttgc

SEQ ID NO: 19943 - RNA, 22 nt, synthetic construct
  source 1..22: mol_type = other RNA
atacgcctggttgcccagtggt

SEQ ID NO: 19944 - RNA, 22 nt, synthetic construct
  source 1..22: mol_type = other RNA
atactctgcaggaacgaagccg

SEQ ID NO: 19945 - RNA, 22 nt, synthetic construct
  source 1..22: mol_type = other RNA
atagcactggggactctttaag

SEQ ID NO: 19946 - RNA, 22 nt, synthetic construct
  source 1..22: mol_type = other RNA
atagccaggagtcctttcgtgg

SEQ ID NO: 19947 - RNA, 22 nt, synthetic construct
  source 1..22: mol_type = other RNA
atagccctgggcccacggcttc

SEQ ID NO: 19948 - RNA, 22 nt, synthetic construct
  source 1..22: mol_type = other RNA
ataggggaggggggcaaggaga

SEQ ID NO: 19949 - RNA, 22 nt, synthetic construct
  source 1..22: mol_type = other RNA
atataaattggggactagaaag

SEQ ID NO: 19950 - RNA, 22 nt, synthetic construct
  source 1..22: mol_type = other RNA
atatgtcccagatagcactggg

SEQ ID NO: 19951 - RNA, 22 nt, synthetic construct
  source 1..22: mol_type = other RNA
atattcctccgcccagagcagg

SEQ ID NO: 19952 - RNA, 22 nt, synthetic construct
  source 1..22: mol_type = other RNA
atattgttcctccgtgcgtcag

SEQ ID NO: 19953 - RNA, 22 nt, synthetic construct
  source 1..22: mol_type = other RNA
atcaaccacttggtgaggctgg

SEQ ID NO: 19954 - RNA, 22 nt, synthetic construct
  source 1..22: mol_type = other RNA
atcaagagtcacccagagacag

SEQ ID NO: 19955 - RNA, 22 nt, synthetic construct
  source 1..22: mol_type = other RNA
atcagaataagttggtcctgag

SEQ ID NO: 19956 - RNA, 22 nt, synthetic construct
  source 1..22: mol_type = other RNA
atcagtgaaacgcaccagacgg

SEQ ID NO: 19957 - RNA, 22 nt, synthetic construct
  source 1..22: mol_type = other RNA
atccacccaaaaggcagcctgg

SEQ ID NO: 19958 - RNA, 22 nt, synthetic construct
  source 1..22: mol_type = other RNA
atccacgggataaattaccccc

SEQ ID NO: 19959 - RNA, 22 nt, synthetic construct
  source 1..22: mol_type = other RNA
atccagggacacggtgctagga

SEQ ID NO: 19960 - RNA, 22 nt, synthetic construct
  source 1..22: mol_type = other RNA
atcccaggaggcctggagcatt

SEQ ID NO: 19961 - RNA, 22 nt, synthetic construct
  source 1..22: mol_type = other RNA
atcccccagaggccccaggcca

SEQ ID NO: 19962 - RNA, 22 nt, synthetic construct
  source 1..22: mol_type = other RNA
atcccccttcccctgcatcccc

SEQ ID NO: 19963 - RNA, 22 nt, synthetic construct
  source 1..22: mol_type = other RNA
atccccgttcccctgcatcccc

SEQ ID NO: 19964 - RNA, 22 nt, synthetic construct
  source 1..22: mol_type = other RNA
atcccgtggatctaggagttta

SEQ ID NO: 19965 - RNA, 22 nt, synthetic construct
  source 1..22: mol_type = other RNA
atcccgttcccagggcacgtgc

SEQ ID NO: 19966 - RNA, 22 nt, synthetic construct
  source 1..22: mol_type = other RNA
atccctcctctctgaaccccag

SEQ ID NO: 19967 - RNA, 22 nt, synthetic construct
  source 1..22: mol_type = other RNA
atccctgtgaaagatgcctgag

SEQ ID NO: 19968 - RNA, 22 nt, synthetic construct
  source 1..22: mol_type = other RNA
atccctgttttcctaggactga

SEQ ID NO: 19969 - RNA, 22 nt, synthetic construct
  source 1..22: mol_type = other RNA
atcctggctccagcccctccta

SEQ ID NO: 19970 - RNA, 22 nt, synthetic construct
  source 1..22: mol_type = other RNA
atcctggtgctgcagcttcctt

SEQ ID NO: 19971 - RNA, 22 nt, synthetic construct
  source 1..22: mol_type = other RNA
atccttctccaggcaggtcccc

SEQ ID NO: 19972 - RNA, 22 nt, synthetic construct
  source 1..22: mol_type = other RNA
atccttctttccttaaagagtc

SEQ ID NO: 19973 - RNA, 22 nt, synthetic construct
  source 1..22: mol_type = other RNA
atcgccatgacaactgggtgga

SEQ ID NO: 19974 - RNA, 22 nt, synthetic construct
  source 1..22: mol_type = other RNA
atcgcccccctgctgtggctgt

SEQ ID NO: 19975 - RNA, 22 nt, synthetic construct
  source 1..22: mol_type = other RNA
atctaggagtttagcttcactc

SEQ ID NO: 19976 - RNA, 22 nt, synthetic construct
  source 1..22: mol_type = other RNA
atctcacaggtaaaactgacgc

SEQ ID NO: 19977 - RNA, 22 nt, synthetic construct
  source 1..22: mol_type = other RNA
atctcatgcccctggctctcct

SEQ ID NO: 19978 - RNA, 22 nt, synthetic construct
  source 1..22: mol_type = other RNA
atctgagggcggaagggctggg

SEQ ID NO: 19979 - RNA, 22 nt, synthetic construct
  source 1..22: mol_type = other RNA
atctgcaaacaggaagtgaacg

SEQ ID NO: 19980 - RNA, 22 nt, synthetic construct
  source 1..22: mol_type = other RNA
atctgctggggtggtttccgag

SEQ ID NO: 19981 - RNA, 22 nt, synthetic construct
  source 1..22: mol_type = other RNA
atctggaggaggcgggagggag

SEQ ID NO: 19982 - RNA, 22 nt, synthetic construct
  source 1..22: mol_type = other RNA
atctgggacatattcctccgcc

SEQ ID NO: 19983 - RNA, 22 nt, synthetic construct
  source 1..22: mol_type = other RNA
atctgggtgcgggaaccccaca

SEQ ID NO: 19984 - RNA, 22 nt, synthetic construct
  source 1..22: mol_type = other RNA
atctgttttcgtggctccctct

SEQ ID NO: 19985 - RNA, 22 nt, synthetic construct
  source 1..22: mol_type = other RNA
atcttaaacagccagtggccag

SEQ ID NO: 19986 - RNA, 22 nt, synthetic construct
  source 1..22: mol_type = other RNA
atctttcacagggatgcctgta

SEQ ID NO: 19987 - RNA, 22 nt, synthetic construct
  source 1..22: mol_type = other RNA
atgaactcggctcgtttatttc

SEQ ID NO: 19988 - RNA, 22 nt, synthetic construct
  source 1..22: mol_type = other RNA
atgaaggagtccaggcccccag

SEQ ID NO: 19989 - RNA, 22 nt, synthetic construct
  source 1..22: mol_type = other RNA
atgacaactgggtggaaataaa

SEQ ID NO: 19990 - RNA, 22 nt, synthetic construct
  source 1..22: mol_type = other RNA
atgacccaacagcctctggcca

SEQ ID NO: 19991 - RNA, 22 nt, synthetic construct
  source 1..22: mol_type = other RNA
atgacctcatgctcttggccct

SEQ ID NO: 19992 - RNA, 22 nt, synthetic construct
  source 1..22: mol_type = other RNA
atgagaaacggtggcccgtgtc

SEQ ID NO: 19993 - RNA, 22 nt, synthetic construct
  source 1..22: mol_type = other RNA
atgagaagccccctcccttccc

SEQ ID NO: 19994 - RNA, 22 nt, synthetic construct
  source 1..22: mol_type = other RNA
atgagatggtggacgaggaagg

SEQ ID NO: 19995 - RNA, 22 nt, synthetic construct
  source 1..22: mol_type = other RNA
atgaggtcatggaaactcgggc

SEQ ID NO: 19996 - RNA, 22 nt, synthetic construct
  source 1..22: mol_type = other RNA
atgcaggacgagaaacacagcc

SEQ ID NO: 19997 - RNA, 22 nt, synthetic construct
  source 1..22: mol_type = other RNA
atgcaggggaacggggatgcag

SEQ ID NO: 19998 - RNA, 22 nt, synthetic construct
  source 1..22: mol_type = other RNA
atgcaggggaacggggctcagt

SEQ ID NO: 19999 - RNA, 22 nt, synthetic construct
  source 1..22: mol_type = other RNA
atgcaggggaagggggatgcag

SEQ ID NO: 20000 - RNA, 22 nt, synthetic construct
  source 1..22: mol_type = other RNA
atgcagggtggaggaaggccac

SEQ ID NO: 20001 - RNA, 22 nt, synthetic construct
  source 1..22: mol_type = other RNA
atgcccctggctctcctgcccc

SEQ ID NO: 20002 - RNA, 22 nt, synthetic construct
  source 1..22: mol_type = other RNA
atgcctgaggcctgggcaccag

SEQ ID NO: 20003 - RNA, 22 nt, synthetic construct
  source 1..22: mol_type = other RNA
atgcctgtactgggcaggtcct

SEQ ID NO: 20004 - RNA, 22 nt, synthetic construct
  source 1..22: mol_type = other RNA
atgcgtgacctgcccggttctc

SEQ ID NO: 20005 - RNA, 22 nt, synthetic construct
  source 1..22: mol_type = other RNA
atgctccaggcctcctgggata

SEQ ID NO: 20006 - RNA, 22 nt, synthetic construct
  source 1..22: mol_type = other RNA
atgctcttggccctcgtagctc

SEQ ID NO: 20007 - RNA, 22 nt, synthetic construct
  source 1..22: mol_type = other RNA
atgctgtttgcccaggacagcc

SEQ ID NO: 20008 - RNA, 22 nt, synthetic construct
  source 1..22: mol_type = other RNA
atgcttggggacctgcctggag

SEQ ID NO: 20009 - RNA, 22 nt, synthetic construct
  source 1..22: mol_type = other RNA
atggaaactcgggctgtgaagg

SEQ ID NO: 20010 - RNA, 22 nt, synthetic construct
  source 1..22: mol_type = other RNA
atggagaaagagaaagggagta

SEQ ID NO: 20011 - RNA, 22 nt, synthetic construct
  source 1..22: mol_type = other RNA
atggcgataggggaggggggca

SEQ ID NO: 20012 - RNA, 22 nt, synthetic construct
  source 1..22: mol_type = other RNA
atgggcagctttggagaggtga

SEQ ID NO: 20013 - RNA, 22 nt, synthetic construct
  source 1..22: mol_type = other RNA
atgggcctttccctttcaagga

SEQ ID NO: 20014 - RNA, 22 nt, synthetic construct
  source 1..22: mol_type = other RNA
atggggagaggctgggggcctg

SEQ ID NO: 20015 - RNA, 22 nt, synthetic construct
  source 1..22: mol_type = other RNA
atggggaggggttgggcctgga

SEQ ID NO: 20016 - RNA, 22 nt, synthetic construct
  source 1..22: mol_type = other RNA
atgggggcagggtaccagcctc

SEQ ID NO: 20017 - RNA, 22 nt, synthetic construct
  source 1..22: mol_type = other RNA
atggtacctgttagacacggca

SEQ ID NO: 20018 - RNA, 22 nt, synthetic construct
  source 1..22: mol_type = other RNA
atggtgcgtcctaggtgttcac

SEQ ID NO: 20019 - RNA, 22 nt, synthetic construct
  source 1..22: mol_type = other RNA
atggtggacgaggaagggggac

SEQ ID NO: 20020 - RNA, 22 nt, synthetic construct
  source 1..22: mol_type = other RNA
atggttggtcactgtctctggg

SEQ ID NO: 20021 - RNA, 22 nt, synthetic construct
  source 1..22: mol_type = other RNA
atgtcccagatagcactgggga

SEQ ID NO: 20022 - RNA, 22 nt, synthetic construct
  source 1..22: mol_type = other RNA
atgtggggttcccgcacccaga

SEQ ID NO: 20023 - RNA, 22 nt, synthetic construct
  source 1..22: mol_type = other RNA
attaccccccaagtccctcacc

SEQ ID NO: 20024 - RNA, 22 nt, synthetic construct
  source 1..22: mol_type = other RNA
attcaacccaggaggccaggcc

SEQ ID NO: 20025 - RNA, 22 nt, synthetic construct
  source 1..22: mol_type = other RNA
attcagacccaggggtccaggc

SEQ ID NO: 20026 - RNA, 22 nt, synthetic construct
  source 1..22: mol_type = other RNA
attcccggccagtttctccacc

SEQ ID NO: 20027 - RNA, 22 nt, synthetic construct
  source 1..22: mol_type = other RNA
attcccttctcaggttacgtgg

SEQ ID NO: 20028 - RNA, 22 nt, synthetic construct
  source 1..22: mol_type = other RNA
attcctccgcccagagcagggt

SEQ ID NO: 20029 - RNA, 22 nt, synthetic construct
  source 1..22: mol_type = other RNA
attcctgcaccccaattgcctt

SEQ ID NO: 20030 - RNA, 22 nt, synthetic construct
  source 1..22: mol_type = other RNA
attctcacaaagggagttttcc

SEQ ID NO: 20031 - RNA, 22 nt, synthetic construct
  source 1..22: mol_type = other RNA
attctcctccaactgtggggtg

SEQ ID NO: 20032 - RNA, 22 nt, synthetic construct
  source 1..22: mol_type = other RNA
attctgattttgtttttccaaa

SEQ ID NO: 20033 - RNA, 22 nt, synthetic construct
  source 1..22: mol_type = other RNA
attcttagggctgaacagagaa

SEQ ID NO: 20034 - RNA, 22 nt, synthetic construct
  source 1..22: mol_type = other RNA
attcttcccttaggggtccaaa

SEQ ID NO: 20035 - RNA, 22 nt, synthetic construct
  source 1..22: mol_type = other RNA
attgccttagtggctagggggt

SEQ ID NO: 20036 - RNA, 22 nt, synthetic construct
  source 1..22: mol_type = other RNA
attgctctccttgcccccctcc

SEQ ID NO: 20037 - RNA, 22 nt, synthetic construct
  source 1..22: mol_type = other RNA
attggggactagaaaggtgaag

SEQ ID NO: 20038 - RNA, 22 nt, synthetic construct
  source 1..22: mol_type = other RNA
attggggtgcaggaatgggggc

SEQ ID NO: 20039 - RNA, 22 nt, synthetic construct
  source 1..22: mol_type = other RNA
attggggtgggctggggttcag

SEQ ID NO: 20040 - RNA, 22 nt, synthetic construct
  source 1..22: mol_type = other RNA
attgttcctccgtgcgtcagtt

SEQ ID NO: 20041 - RNA, 22 nt, synthetic construct
  source 1..22: mol_type = other RNA
atttatattgttcctccgtgcg

SEQ ID NO: 20042 - RNA, 22 nt, synthetic construct
  source 1..22: mol_type = other RNA
atttatcccgtggatctaggag

SEQ ID NO: 20043 - RNA, 22 nt, synthetic construct
  source 1..22: mol_type = other RNA
atttccacccagttgtcatggc

SEQ ID NO: 20044 - RNA, 22 nt, synthetic construct
  source 1..22: mol_type = other RNA
attttccccactgtcctagcac

SEQ ID NO: 20045 - RNA, 22 nt, synthetic construct
  source 1..22: mol_type = other RNA
attttgtttttccaaactgctt

SEQ ID NO: 20046 - RNA, 22 nt, synthetic construct
  source 1..22: mol_type = other RNA
caaaacccccgtcaccacccac

SEQ ID NO: 20047 - RNA, 22 nt, synthetic construct
  source 1..22: mol_type = other RNA
caaaacttggggggacaaaagc

SEQ ID NO: 20048 - RNA, 22 nt, synthetic construct
  source 1..22: mol_type = other RNA
caaaagccgaagtccagggggt

SEQ ID NO: 20049 - RNA, 22 nt, synthetic construct
  source 1..22: mol_type = other RNA
caaaaggcagcctggtagacag

SEQ ID NO: 20050 - RNA, 22 nt, synthetic construct
  source 1..22: mol_type = other RNA
caaaatcagaataagttggtcc

SEQ ID NO: 20051 - RNA, 22 nt, synthetic construct
  source 1..22: mol_type = other RNA
caaacagcataagctggtcacc

SEQ ID NO: 20052 - RNA, 22 nt, synthetic construct
  source 1..22: mol_type = other RNA
caaacaggaagtgaacggggaa

SEQ ID NO: 20053 - RNA, 22 nt, synthetic construct
  source 1..22: mol_type = other RNA
caaacccagaagcccagagcag

SEQ ID NO: 20054 - RNA, 22 nt, synthetic construct
  source 1..22: mol_type = other RNA
caaacccagctcccctgcttct

SEQ ID NO: 20055 - RNA, 22 nt, synthetic construct
  source 1..22: mol_type = other RNA
caaacccaggagcccaggcccc

SEQ ID NO: 20056 - RNA, 22 nt, synthetic construct
  source 1..22: mol_type = other RNA
caaactcactcttcggggtatc

SEQ ID NO: 20057 - RNA, 22 nt, synthetic construct
  source 1..22: mol_type = other RNA
caaactgcttctcctcttggga

SEQ ID NO: 20058 - RNA, 22 nt, synthetic construct
  source 1..22: mol_type = other RNA
caaagctgcccatctggaggag

SEQ ID NO: 20059 - RNA, 22 nt, synthetic construct
  source 1..22: mol_type = other RNA
caaagggagttttccacacgga

SEQ ID NO: 20060 - RNA, 22 nt, synthetic construct
  source 1..22: mol_type = other RNA
caaagttagaactcaggaccaa

SEQ ID NO: 20061 - RNA, 22 nt, synthetic construct
  source 1..22: mol_type = other RNA
caacagcctctggccactggct

SEQ ID NO: 20062 - RNA, 22 nt, synthetic construct
  source 1..22: mol_type = other RNA
caaccacttggtgaggctggta

SEQ ID NO: 20063 - RNA, 22 nt, synthetic construct
  source 1..22: mol_type = other RNA
caaccaggcgtatcttaaacag

SEQ ID NO: 20064 - RNA, 22 nt, synthetic construct
  source 1..22: mol_type = other RNA
caaccatccctgttttcctagg

SEQ ID NO: 20065 - RNA, 22 nt, synthetic construct
  source 1..22: mol_type = other RNA
caacccaggaggccaggcccca

SEQ ID NO: 20066 - RNA, 22 nt, synthetic construct
  source 1..22: mol_type = other RNA
caaccccctagccactaaggca

SEQ ID NO: 20067 - RNA, 22 nt, synthetic construct
  source 1..22: mol_type = other RNA
caacccctccccattcaaccca

SEQ ID NO: 20068 - RNA, 22 nt, synthetic construct
  source 1..22: mol_type = other RNA
caactgggtggaaataaacgag

SEQ ID NO: 20069 - RNA, 22 nt, synthetic construct
  source 1..22: mol_type = other RNA
caactgtggggtgactgcttgg

SEQ ID NO: 20070 - RNA, 22 nt, synthetic construct
  source 1..22: mol_type = other RNA
caacttattctgattttgtttt

SEQ ID NO: 20071 - RNA, 22 nt, synthetic construct
  source 1..22: mol_type = other RNA
caagaagcaggggagctgggtt

SEQ ID NO: 20072 - RNA, 22 nt, synthetic construct
  source 1..22: mol_type = other RNA
caagagcatgaggtcatggaaa

SEQ ID NO: 20073 - RNA, 22 nt, synthetic construct
  source 1..22: mol_type = other RNA
caagaggagaagcagtttggaa

SEQ ID NO: 20074 - RNA, 22 nt, synthetic construct
  source 1..22: mol_type = other RNA
caagagtcacccagagacagtg

SEQ ID NO: 20075 - RNA, 22 nt, synthetic construct
  source 1..22: mol_type = other RNA
caagcagtcaccccacagttgg

SEQ ID NO: 20076 - RNA, 22 nt, synthetic construct
  source 1..22: mol_type = other RNA
caagcatcgcccccctgctgtg

SEQ ID NO: 20077 - RNA, 22 nt, synthetic construct
  source 1..22: mol_type = other RNA
caagcccaggagaggcgctcag

SEQ ID NO: 20078 - RNA, 22 nt, synthetic construct
  source 1..22: mol_type = other RNA
caagctcggaaaccaccccagc

SEQ ID NO: 20079 - RNA, 22 nt, synthetic construct
  source 1..22: mol_type = other RNA
caaggacctgcccagtacaggc

SEQ ID NO: 20080 - RNA, 22 nt, synthetic construct
  source 1..22: mol_type = other RNA
caaggactcaaacccagaagcc

SEQ ID NO: 20081 - RNA, 22 nt, synthetic construct
  source 1..22: mol_type = other RNA
caaggagagcaatgggcctttc

SEQ ID NO: 20082 - RNA, 22 nt, synthetic construct
  source 1..22: mol_type = other RNA
caaggcctggggcaagtccctc

SEQ ID NO: 20083 - RNA, 22 nt, synthetic construct
  source 1..22: mol_type = other RNA
caagggtcaagctcggaaacca

SEQ ID NO: 20084 - RNA, 22 nt, synthetic construct
  source 1..22: mol_type = other RNA
caagtaggtggcctggggcctc

SEQ ID NO: 20085 - RNA, 22 nt, synthetic construct
  source 1..22: mol_type = other RNA
caagtccctcacctctccaaag

SEQ ID NO: 20086 - RNA, 22 nt, synthetic construct
  source 1..22: mol_type = other RNA
caagtccctcctccgaccccct

SEQ ID NO: 20087 - RNA, 22 nt, synthetic construct
  source 1..22: mol_type = other RNA
caagtcgggactccagagggag

SEQ ID NO: 20088 - RNA, 22 nt, synthetic construct
  source 1..22: mol_type = other RNA
caagtggttgataaacccacgt

SEQ ID NO: 20089 - RNA, 22 nt, synthetic construct
  source 1..22: mol_type = other RNA
caagttcttagggtaccccacg

SEQ ID NO: 20090 - RNA, 22 nt, synthetic construct
  source 1..22: mol_type = other RNA
caagttttggacccctaaggga

SEQ ID NO: 20091 - RNA, 22 nt, synthetic construct
  source 1..22: mol_type = other RNA
caatataaattggggactagaa

SEQ ID NO: 20092 - RNA, 22 nt, synthetic construct
  source 1..22: mol_type = other RNA
caatgctccaggcctcctggga

SEQ ID NO: 20093 - RNA, 22 nt, synthetic construct
  source 1..22: mol_type = other RNA
caatgggcctttccctttcaag

SEQ ID NO: 20094 - RNA, 22 nt, synthetic construct
  source 1..22: mol_type = other RNA
caattgccttagtggctagggg

SEQ ID NO: 20095 - RNA, 22 nt, synthetic construct
  source 1..22: mol_type = other RNA
caattggggtgcaggaatgggg

SEQ ID NO: 20096 - RNA, 22 nt, synthetic construct
  source 1..22: mol_type = other RNA
caatttatattgttcctccgtg

SEQ ID NO: 20097 - RNA, 22 nt, synthetic construct
  source 1..22: mol_type = other RNA
cacaaagggagttttccacacg

SEQ ID NO: 20098 - RNA, 22 nt, synthetic construct
  source 1..22: mol_type = other RNA
cacaaggcctggggcaagtccc

SEQ ID NO: 20099 - RNA, 22 nt, synthetic construct
  source 1..22: mol_type = other RNA
cacacaggtgtgcagctgtctc

SEQ ID NO: 20100 - RNA, 22 nt, synthetic construct
  source 1..22: mol_type = other RNA
cacacccagacctgacccaaac

SEQ ID NO: 20101 - RNA, 22 nt, synthetic construct
  source 1..22: mol_type = other RNA
cacacctgtgtgcctgggcccc

SEQ ID NO: 20102 - RNA, 22 nt, synthetic construct
  source 1..22: mol_type = other RNA
cacacggacacccccctcctca

SEQ ID NO: 20103 - RNA, 22 nt, synthetic construct
  source 1..22: mol_type = other RNA
cacactccagttcactgaggcc

SEQ ID NO: 20104 - RNA, 22 nt, synthetic construct
  source 1..22: mol_type = other RNA
cacagcaggggggcgatgcttg

SEQ ID NO: 20105 - RNA, 22 nt, synthetic construct
  source 1..22: mol_type = other RNA
cacagccccaggtggagaaact

SEQ ID NO: 20106 - RNA, 22 nt, synthetic construct
  source 1..22: mol_type = other RNA
cacagcccgagtttccatgacc

SEQ ID NO: 20107 - RNA, 22 nt, synthetic construct
  source 1..22: mol_type = other RNA
cacagccctgccaggacggggc

SEQ ID NO: 20108 - RNA, 22 nt, synthetic construct
  source 1..22: mol_type = other RNA
cacagggatgcctgtactgggc

SEQ ID NO: 20109 - RNA, 22 nt, synthetic construct
  source 1..22: mol_type = other RNA
cacagggtggccttcctccacc

SEQ ID NO: 20110 - RNA, 22 nt, synthetic construct
  source 1..22: mol_type = other RNA
cacaggtaaaactgacgcacgg

SEQ ID NO: 20111 - RNA, 22 nt, synthetic construct
  source 1..22: mol_type = other RNA
cacaggtggcgcttccagtgct

SEQ ID NO: 20112 - RNA, 22 nt, synthetic construct
  source 1..22: mol_type = other RNA
cacaggtgtgcagctgtctcac

SEQ ID NO: 20113 - RNA, 22 nt, synthetic construct
  source 1..22: mol_type = other RNA
cacagttggaggagaatccacc

SEQ ID NO: 20114 - RNA, 22 nt, synthetic construct
  source 1..22: mol_type = other RNA
cacatggtacctgttagacacg

SEQ ID NO: 20115 - RNA, 22 nt, synthetic construct
  source 1..22: mol_type = other RNA
caccaagtggttgataaaccca

SEQ ID NO: 20116 - RNA, 22 nt, synthetic construct
  source 1..22: mol_type = other RNA
caccacagccctgccaggacgg

SEQ ID NO: 20117 - RNA, 22 nt, synthetic construct
  source 1..22: mol_type = other RNA
caccacccacaggtggcgcttc

SEQ ID NO: 20118 - RNA, 22 nt, synthetic construct
  source 1..22: mol_type = other RNA
caccagacggccgcgtcagagc

SEQ ID NO: 20119 - RNA, 22 nt, synthetic construct
  source 1..22: mol_type = other RNA
caccaggatcagtgaaacgcac

SEQ ID NO: 20120 - RNA, 22 nt, synthetic construct
  source 1..22: mol_type = other RNA
caccagggactccagagtccag

SEQ ID NO: 20121 - RNA, 22 nt, synthetic construct
  source 1..22: mol_type = other RNA
caccaggtcgtggccgcctcta

SEQ ID NO: 20122 - RNA, 22 nt, synthetic construct
  source 1..22: mol_type = other RNA
caccatctcatgcccctggctc

SEQ ID NO: 20123 - RNA, 22 nt, synthetic construct
  source 1..22: mol_type = other RNA
caccattctcacaaagggagtt

SEQ ID NO: 20124 - RNA, 22 nt, synthetic construct
  source 1..22: mol_type = other RNA
cacccaaaaggcagcctggtag

SEQ ID NO: 20125 - RNA, 22 nt, synthetic construct
  source 1..22: mol_type = other RNA
cacccacaggtggcgcttccag

SEQ ID NO: 20126 - RNA, 22 nt, synthetic construct
  source 1..22: mol_type = other RNA
cacccagacctgacccaaaccc

SEQ ID NO: 20127 - RNA, 22 nt, synthetic construct
  source 1..22: mol_type = other RNA
cacccagagacagtgaccaacc

SEQ ID NO: 20128 - RNA, 22 nt, synthetic construct
  source 1..22: mol_type = other RNA
cacccagatgagaagccccctc

SEQ ID NO: 20129 - RNA, 22 nt, synthetic construct
  source 1..22: mol_type = other RNA
cacccagtgtccacaaggcctg

SEQ ID NO: 20130 - RNA, 22 nt, synthetic construct
  source 1..22: mol_type = other RNA
cacccagttgtcatggcgatag

SEQ ID NO: 20131 - RNA, 22 nt, synthetic construct
  source 1..22: mol_type = other RNA
caccccaatgctccaggcctcc

SEQ ID NO: 20132 - RNA, 22 nt, synthetic construct
  source 1..22: mol_type = other RNA
caccccaattgccttagtggct

SEQ ID NO: 20133 - RNA, 22 nt, synthetic construct
  source 1..22: mol_type = other RNA
caccccacacccagacctgacc

SEQ ID NO: 20134 - RNA, 22 nt, synthetic construct
  source 1..22: mol_type = other RNA
caccccacagttggaggagaat

SEQ ID NO: 20135 - RNA, 22 nt, synthetic construct
  source 1..22: mol_type = other RNA
caccccagcagatactctgcag

SEQ ID NO: 20136 - RNA, 22 nt, synthetic construct
  source 1..22: mol_type = other RNA
caccccagccctgtctaccagg

SEQ ID NO: 20137 - RNA, 22 nt, synthetic construct
  source 1..22: mol_type = other RNA
cacccccctcctcaccacagcc

SEQ ID NO: 20138 - RNA, 22 nt, synthetic construct
  source 1..22: mol_type = other RNA
cacccctctgggagtcccgccc

SEQ ID NO: 20139 - RNA, 22 nt, synthetic construct
  source 1..22: mol_type = other RNA
caccctcagacccaggagtcca

SEQ ID NO: 20140 - RNA, 22 nt, synthetic construct
  source 1..22: mol_type = other RNA
caccctgcatagccctgggccc

SEQ ID NO: 20141 - RNA, 22 nt, synthetic construct
  source 1..22: mol_type = other RNA
caccctgcgctaccctctccca

SEQ ID NO: 20142 - RNA, 22 nt, synthetic construct
  source 1..22: mol_type = other RNA
caccctgtgctgggacagactc

SEQ ID NO: 20143 - RNA, 22 nt, synthetic construct
  source 1..22: mol_type = other RNA
caccgtgtccctggatctgttt

SEQ ID NO: 20144 - RNA, 22 nt, synthetic construct
  source 1..22: mol_type = other RNA
caccgtttctcattcttccctt

SEQ ID NO: 20145 - RNA, 22 nt, synthetic construct
  source 1..22: mol_type = other RNA
cacctacttggcctggacccca

SEQ ID NO: 20146 - RNA, 22 nt, synthetic construct
  source 1..22: mol_type = other RNA
cacctaggacgcaccattctca

SEQ ID NO: 20147 - RNA, 22 nt, synthetic construct
  source 1..22: mol_type = other RNA
cacctctccaaagctgcccatc

SEQ ID NO: 20148 - RNA, 22 nt, synthetic construct
  source 1..22: mol_type = other RNA
cacctggggctgtgtttctcgt

SEQ ID NO: 20149 - RNA, 22 nt, synthetic construct
  source 1..22: mol_type = other RNA
cacctgtgggtggtgacggggg

SEQ ID NO: 20150 - RNA, 22 nt, synthetic construct
  source 1..22: mol_type = other RNA
cacctgtgtgcctgggccccag

SEQ ID NO: 20151 - RNA, 22 nt, synthetic construct
  source 1..22: mol_type = other RNA
cacctttctagtccccaattta

SEQ ID NO: 20152 - RNA, 22 nt, synthetic construct
  source 1..22: mol_type = other RNA
cacgaaaacagatccagggaca

SEQ ID NO: 20153 - RNA, 22 nt, synthetic construct
  source 1..22: mol_type = other RNA
cacgaaaggactcctggctatc

SEQ ID NO: 20154 - RNA, 22 nt, synthetic construct
  source 1..22: mol_type = other RNA
cacgacctggtgaacacctagg

SEQ ID NO: 20155 - RNA, 22 nt, synthetic construct
  source 1..22: mol_type = other RNA
cacgagaggccaccccagccct

SEQ ID NO: 20156 - RNA, 22 nt, synthetic construct
  source 1..22: mol_type = other RNA
cacgagtccaggccccagcccc

SEQ ID NO: 20157 - RNA, 22 nt, synthetic construct
  source 1..22: mol_type = other RNA
cacggacacccccctcctcacc

SEQ ID NO: 20158 - RNA, 22 nt, synthetic construct
  source 1..22: mol_type = other RNA
cacggaggaacaatataaattg

SEQ ID NO: 20159 - RNA, 22 nt, synthetic construct
  source 1..22: mol_type = other RNA
cacggcaaaacccccgtcacca

SEQ ID NO: 20160 - RNA, 22 nt, synthetic construct
  source 1..22: mol_type = other RNA
cacggcttcgttcctgcagagt

SEQ ID NO: 20161 - RNA, 22 nt, synthetic construct
  source 1..22: mol_type = other RNA
cacgggataaattaccccccaa

SEQ ID NO: 20162 - RNA, 22 nt, synthetic construct
  source 1..22: mol_type = other RNA
cacgggccaccgtttctcattc

SEQ ID NO: 20163 - RNA, 22 nt, synthetic construct
  source 1..22: mol_type = other RNA
cacggggccctgcagccagggg

SEQ ID NO: 20164 - RNA, 22 nt, synthetic construct
  source 1..22: mol_type = other RNA
cacggtgctaggacagtgggga

SEQ ID NO: 20165 - RNA, 22 nt, synthetic construct
  source 1..22: mol_type = other RNA
cacggtgtcccagcaagtcggg

SEQ ID NO: 20166 - RNA, 22 nt, synthetic construct
  source 1..22: mol_type = other RNA
cacgtaacctgagaagggaatc

SEQ ID NO: 20167 - RNA, 22 nt, synthetic construct
  source 1..22: mol_type = other RNA
cacgtgccctgggaacgggatg

SEQ ID NO: 20168 - RNA, 22 nt, synthetic construct
  source 1..22: mol_type = other RNA
cacgtgcggccccttcacagcc

SEQ ID NO: 20169 - RNA, 22 nt, synthetic construct
  source 1..22: mol_type = other RNA
cacgtggggtaccctaagaact

SEQ ID NO: 20170 - RNA, 22 nt, synthetic construct
  source 1..22: mol_type = other RNA
cacgtgggtttatcaaccactt

SEQ ID NO: 20171 - RNA, 22 nt, synthetic construct
  source 1..22: mol_type = other RNA
cactaaggcaattggggtgcag

SEQ ID NO: 20172 - RNA, 22 nt, synthetic construct
  source 1..22: mol_type = other RNA
cactccagttcactgaggcccc

SEQ ID NO: 20173 - RNA, 22 nt, synthetic construct
  source 1..22: mol_type = other RNA
cactccttcctcagctccagtt

SEQ ID NO: 20174 - RNA, 22 nt, synthetic construct
  source 1..22: mol_type = other RNA
cactcttcggggtatcccagga

SEQ ID NO: 20175 - RNA, 22 nt, synthetic construct
  source 1..22: mol_type = other RNA
cactgaaaccctcagtcctagg

SEQ ID NO: 20176 - RNA, 22 nt, synthetic construct
  source 1..22: mol_type = other RNA
cactgaaggcctggccggcctg

SEQ ID NO: 20177 - RNA, 22 nt, synthetic construct
  source 1..22: mol_type = other RNA
cactgagaaccgggcaggtcac

SEQ ID NO: 20178 - RNA, 22 nt, synthetic construct
  source 1..22: mol_type = other RNA
cactgagcactgaaggcctggc

SEQ ID NO: 20179 - RNA, 22 nt, synthetic construct
  source 1..22: mol_type = other RNA
cactgaggccccctctgcacgg

SEQ ID NO: 20180 - RNA, 22 nt, synthetic construct
  source 1..22: mol_type = other RNA
cactgatcctggtgctgcagct

SEQ ID NO: 20181 - RNA, 22 nt, synthetic construct
  source 1..22: mol_type = other RNA
cactggaagcgccacctgtggg

SEQ ID NO: 20182 - RNA, 22 nt, synthetic construct
  source 1..22: mol_type = other RNA
cactggctgtttaagatacgcc

SEQ ID NO: 20183 - RNA, 22 nt, synthetic construct
  source 1..22: mol_type = other RNA
cactgggcaaccaggcgtatct

SEQ ID NO: 20184 - RNA, 22 nt, synthetic construct
  source 1..22: mol_type = other RNA
cactggggactctttaaggaaa

SEQ ID NO: 20185 - RNA, 22 nt, synthetic construct
  source 1..22: mol_type = other RNA
cactgggtgggctccgggacct

SEQ ID NO: 20186 - RNA, 22 nt, synthetic construct
  source 1..22: mol_type = other RNA
cactgtcctagcaccgtgtccc

SEQ ID NO: 20187 - RNA, 22 nt, synthetic construct
  source 1..22: mol_type = other RNA
cactgtctctgggtgactcttg

SEQ ID NO: 20188 - RNA, 22 nt, synthetic construct
  source 1..22: mol_type = other RNA
cacttcccaagaggagaagcag

SEQ ID NO: 20189 - RNA, 22 nt, synthetic construct
  source 1..22: mol_type = other RNA
cacttcctgtttgcagatagcc

SEQ ID NO: 20190 - RNA, 22 nt, synthetic construct
  source 1..22: mol_type = other RNA
cacttggtgaggctggtaccct

SEQ ID NO: 20191 - RNA, 22 nt, synthetic construct
  source 1..22: mol_type = other RNA
cagaacctgagctgctctgacg

SEQ ID NO: 20192 - RNA, 22 nt, synthetic construct
  source 1..22: mol_type = other RNA
cagaagcccagagcagggcctt

SEQ ID NO: 20193 - RNA, 22 nt, synthetic construct
  source 1..22: mol_type = other RNA
cagaataagttggtcctgagtt

SEQ ID NO: 20194 - RNA, 22 nt, synthetic construct
  source 1..22: mol_type = other RNA
cagacccacgagtccaggcccc

SEQ ID NO: 20195 - RNA, 22 nt, synthetic construct
  source 1..22: mol_type = other RNA
cagacccaggggtccaggccca

SEQ ID NO: 20196 - RNA, 22 nt, synthetic construct
  source 1..22: mol_type = other RNA
cagacctgacccaaacccagct

SEQ ID NO: 20197 - RNA, 22 nt, synthetic construct
  source 1..22: mol_type = other RNA
cagacggccgcgtcagagcagc

SEQ ID NO: 20198 - RNA, 22 nt, synthetic construct
  source 1..22: mol_type = other RNA
cagactagggaagaggttccag

SEQ ID NO: 20199 - RNA, 22 nt, synthetic construct
  source 1..22: mol_type = other RNA
cagactcaggggcctgggcggg

SEQ ID NO: 20200 - RNA, 22 nt, synthetic construct
  source 1..22: mol_type = other RNA
cagactgagccccgttcccctg

SEQ ID NO: 20201 - RNA, 22 nt, synthetic construct
  source 1..22: mol_type = other RNA
cagagaagagctgggggcctgg

SEQ ID NO: 20202 - RNA, 22 nt, synthetic construct
  source 1..22: mol_type = other RNA
cagagacagtgaccaaccatcc

SEQ ID NO: 20203 - RNA, 22 nt, synthetic construct
  source 1..22: mol_type = other RNA
cagagaggagggattcccttct

SEQ ID NO: 20204 - RNA, 22 nt, synthetic construct
  source 1..22: mol_type = other RNA
cagagcagctcaggttctggga

SEQ ID NO: 20205 - RNA, 22 nt, synthetic construct
  source 1..22: mol_type = other RNA
cagagcagggccttagggaagc

SEQ ID NO: 20206 - RNA, 22 nt, synthetic construct
  source 1..22: mol_type = other RNA
cagagcagggtcccgcttccct

SEQ ID NO: 20207 - RNA, 22 nt, synthetic construct
  source 1..22: mol_type = other RNA
cagagccaggaacccctgtagg

SEQ ID NO: 20208 - RNA, 22 nt, synthetic construct
  source 1..22: mol_type = other RNA
cagagccaggagtcctggcccc

SEQ ID NO: 20209 - RNA, 22 nt, synthetic construct
  source 1..22: mol_type = other RNA
cagaggccccaggccacctact

SEQ ID NO: 20210 - RNA, 22 nt, synthetic construct
  source 1..22: mol_type = other RNA
cagaggctgttgggtcattttc

SEQ ID NO: 20211 - RNA, 22 nt, synthetic construct
  source 1..22: mol_type = other RNA
cagagggagccacgaaaacaga

SEQ ID NO: 20212 - RNA, 22 nt, synthetic construct
  source 1..22: mol_type = other RNA
cagagggggcctcagtgaactg

SEQ ID NO: 20213 - RNA, 22 nt, synthetic construct
  source 1..22: mol_type = other RNA
cagaggggtgagacagctgcac

SEQ ID NO: 20214 - RNA, 22 nt, synthetic construct
  source 1..22: mol_type = other RNA
cagagtatctgctggggtggtt

SEQ ID NO: 20215 - RNA, 22 nt, synthetic construct
  source 1..22: mol_type = other RNA
cagagtccaggcccaacccctc

SEQ ID NO: 20216 - RNA, 22 nt, synthetic construct
  source 1..22: mol_type = other RNA
cagatactctgcaggaacgaag

SEQ ID NO: 20217 - RNA, 22 nt, synthetic construct
  source 1..22: mol_type = other RNA
cagatagcactggggactcttt

SEQ ID NO: 20218 - RNA, 22 nt, synthetic construct
  source 1..22: mol_type = other RNA
cagatagccaggagtcctttcg

SEQ ID NO: 20219 - RNA, 22 nt, synthetic construct
  source 1..22: mol_type = other RNA
cagatccagggacacggtgcta

SEQ ID NO: 20220 - RNA, 22 nt, synthetic construct
  source 1..22: mol_type = other RNA
cagatgaaggagtccaggcccc

SEQ ID NO: 20221 - RNA, 22 nt, synthetic construct
  source 1..22: mol_type = other RNA
cagatgagaagccccctccctt

SEQ ID NO: 20222 - RNA, 22 nt, synthetic construct
  source 1..22: mol_type = other RNA
cagatgggcagctttggagagg

SEQ ID NO: 20223 - RNA, 22 nt, synthetic construct
  source 1..22: mol_type = other RNA
cagcaagtcgggactccagagg

SEQ ID NO: 20224 - RNA, 22 nt, synthetic construct
  source 1..22: mol_type = other RNA
cagcacagggtggccttcctcc

SEQ ID NO: 20225 - RNA, 22 nt, synthetic construct
  source 1..22: mol_type = other RNA
cagcaccaggatcagtgaaacg

SEQ ID NO: 20226 - RNA, 22 nt, synthetic construct
  source 1..22: mol_type = other RNA
cagcagatactctgcaggaacg

SEQ ID NO: 20227 - RNA, 22 nt, synthetic construct
  source 1..22: mol_type = other RNA
cagcaggggggcgatgcttggg

SEQ ID NO: 20228 - RNA, 22 nt, synthetic construct
  source 1..22: mol_type = other RNA
cagcataagctggtcaccccac

SEQ ID NO: 20229 - RNA, 22 nt, synthetic construct
  source 1..22: mol_type = other RNA
cagccacagcaggggggcgatg

SEQ ID NO: 20230 - RNA, 22 nt, synthetic construct
  source 1..22: mol_type = other RNA
cagccacggtgtcccagcaagt

SEQ ID NO: 20231 - RNA, 22 nt, synthetic construct
  source 1..22: mol_type = other RNA
cagccaggggctgacacgggcc

SEQ ID NO: 20232 - RNA, 22 nt, synthetic construct
  source 1..22: mol_type = other RNA
cagccaggtccttccaagggtc

SEQ ID NO: 20233 - RNA, 22 nt, synthetic construct
  source 1..22: mol_type = other RNA
cagccagtggccagaggctgtt

SEQ ID NO: 20234 - RNA, 22 nt, synthetic construct
  source 1..22: mol_type = other RNA
cagcccaccccaatgctccagg

SEQ ID NO: 20235 - RNA, 22 nt, synthetic construct
  source 1..22: mol_type = other RNA
cagccccaggtggagaaactgg

SEQ ID NO: 20236 - RNA, 22 nt, synthetic construct
  source 1..22: mol_type = other RNA
cagccccgcctccctaagaccc

SEQ ID NO: 20237 - RNA, 22 nt, synthetic construct
  source 1..22: mol_type = other RNA
cagccccgtcctggcagggctg

SEQ ID NO: 20238 - RNA, 22 nt, synthetic construct
  source 1..22: mol_type = other RNA
cagcccctcctactctagcccc

SEQ ID NO: 20239 - RNA, 22 nt, synthetic construct
  source 1..22: mol_type = other RNA
cagcccctcctccctcagaccc

SEQ ID NO: 20240 - RNA, 22 nt, synthetic construct
  source 1..22: mol_type = other RNA
cagcccctcctccttcagagcc

SEQ ID NO: 20241 - RNA, 22 nt, synthetic construct
  source 1..22: mol_type = other RNA
cagcccctcctctctcaaaccc

SEQ ID NO: 20242 - RNA, 22 nt, synthetic construct
  source 1..22: mol_type = other RNA
cagcccctcctgccttaaaccc

SEQ ID NO: 20243 - RNA, 22 nt, synthetic construct
  source 1..22: mol_type = other RNA
cagcccctggctgcagggcccc

SEQ ID NO: 20244 - RNA, 22 nt, synthetic construct
  source 1..22: mol_type = other RNA
cagcccgagtttccatgacctc

SEQ ID NO: 20245 - RNA, 22 nt, synthetic construct
  source 1..22: mol_type = other RNA
cagccctaagaatcctggctcc

SEQ ID NO: 20246 - RNA, 22 nt, synthetic construct
  source 1..22: mol_type = other RNA
cagccctgccaggacggggctg

SEQ ID NO: 20247 - RNA, 22 nt, synthetic construct
  source 1..22: mol_type = other RNA
cagccctgtctaccaggctgcc

SEQ ID NO: 20248 - RNA, 22 nt, synthetic construct
  source 1..22: mol_type = other RNA
cagcccttccgccctcagatga

SEQ ID NO: 20249 - RNA, 22 nt, synthetic construct
  source 1..22: mol_type = other RNA
cagcctagttttagcactgaaa

SEQ ID NO: 20250 - RNA, 22 nt, synthetic construct
  source 1..22: mol_type = other RNA
cagcctcaccaagtggttgata

SEQ ID NO: 20251 - RNA, 22 nt, synthetic construct
  source 1..22: mol_type = other RNA
cagcctctccccattcagaccc

SEQ ID NO: 20252 - RNA, 22 nt, synthetic construct
  source 1..22: mol_type = other RNA
cagcctctggccactggctgtt

SEQ ID NO: 20253 - RNA, 22 nt, synthetic construct
  source 1..22: mol_type = other RNA
cagcctggggcccaggcacaca

SEQ ID NO: 20254 - RNA, 22 nt, synthetic construct
  source 1..22: mol_type = other RNA
cagcctggtagacagggctggg

SEQ ID NO: 20255 - RNA, 22 nt, synthetic construct
  source 1..22: mol_type = other RNA
cagctcaggttctgggagaggg

SEQ ID NO: 20256 - RNA, 22 nt, synthetic construct
  source 1..22: mol_type = other RNA
cagctccagttcaggtcccgga

SEQ ID NO: 20257 - RNA, 22 nt, synthetic construct
  source 1..22: mol_type = other RNA
cagctcccctgcttcttggcca

SEQ ID NO: 20258 - RNA, 22 nt, synthetic construct
  source 1..22: mol_type = other RNA
cagctcttctctgttcagccct

SEQ ID NO: 20259 - RNA, 22 nt, synthetic construct
  source 1..22: mol_type = other RNA
cagctgcacacctgtgtgcctg

SEQ ID NO: 20260 - RNA, 22 nt, synthetic construct
  source 1..22: mol_type = other RNA
cagctgtctcacccctctggga

SEQ ID NO: 20261 - RNA, 22 nt, synthetic construct
  source 1..22: mol_type = other RNA
cagcttatgctgtttgcccagg

SEQ ID NO: 20262 - RNA, 22 nt, synthetic construct
  source 1..22: mol_type = other RNA
cagcttccttacacttcccaag

SEQ ID NO: 20263 - RNA, 22 nt, synthetic construct
  source 1..22: mol_type = other RNA
cagctttggagaggtgagggac

SEQ ID NO: 20264 - RNA, 22 nt, synthetic construct
  source 1..22: mol_type = other RNA
caggaacccctgtagggaaggg

SEQ ID NO: 20265 - RNA, 22 nt, synthetic construct
  source 1..22: mol_type = other RNA
caggaacgaagccgtgggccca

SEQ ID NO: 20266 - RNA, 22 nt, synthetic construct
  source 1..22: mol_type = other RNA
caggaagtgaacggggaaggga

SEQ ID NO: 20267 - RNA, 22 nt, synthetic construct
  source 1..22: mol_type = other RNA
caggaatgggggcagggtacca

SEQ ID NO: 20268 - RNA, 22 nt, synthetic construct
  source 1..22: mol_type = other RNA
caggacagcctagttttagcac

SEQ ID NO: 20269 - RNA, 22 nt, synthetic construct
  source 1..22: mol_type = other RNA
caggaccaacttattctgattt

SEQ ID NO: 20270 - RNA, 22 nt, synthetic construct
  source 1..22: mol_type = other RNA
caggacgagaaacacagcccca

SEQ ID NO: 20271 - RNA, 22 nt, synthetic construct
  source 1..22: mol_type = other RNA
caggacggggctggctactggc

SEQ ID NO: 20272 - RNA, 22 nt, synthetic construct
  source 1..22: mol_type = other RNA
caggactcctggctctgaagga

SEQ ID NO: 20273 - RNA, 22 nt, synthetic construct
  source 1..22: mol_type = other RNA
caggagagccaggggcatgaga

SEQ ID NO: 20274 - RNA, 22 nt, synthetic construct
  source 1..22: mol_type = other RNA
caggagaggcgctcaggcttcc

SEQ ID NO: 20275 - RNA, 22 nt, synthetic construct
  source 1..22: mol_type = other RNA
caggagcccaggcccccagctc

SEQ ID NO: 20276 - RNA, 22 nt, synthetic construct
  source 1..22: mol_type = other RNA
caggaggccaggccccagccct

SEQ ID NO: 20277 - RNA, 22 nt, synthetic construct
  source 1..22: mol_type = other RNA
caggaggcctggagcattgggg

SEQ ID NO: 20278 - RNA, 22 nt, synthetic construct
  source 1..22: mol_type = other RNA
caggaggggctgggggccagga

SEQ ID NO: 20279 - RNA, 22 nt, synthetic construct
  source 1..22: mol_type = other RNA
caggagtccaggcccccagtcc

SEQ ID NO: 20280 - RNA, 22 nt, synthetic construct
  source 1..22: mol_type = other RNA
caggagtcctggcccccagccc

SEQ ID NO: 20281 - RNA, 22 nt, synthetic construct
  source 1..22: mol_type = other RNA
caggagtcctttcgtggtttcc

SEQ ID NO: 20282 - RNA, 22 nt, synthetic construct
  source 1..22: mol_type = other RNA
caggatcagtgaaacgcaccag

SEQ ID NO: 20283 - RNA, 22 nt, synthetic construct
  source 1..22: mol_type = other RNA
caggattcttagggctgaacag

SEQ ID NO: 20284 - RNA, 22 nt, synthetic construct
  source 1..22: mol_type = other RNA
caggcacacaggtgtgcagctg

SEQ ID NO: 20285 - RNA, 22 nt, synthetic construct
  source 1..22: mol_type = other RNA
caggcaggtccccaagcatcgc

SEQ ID NO: 20286 - RNA, 22 nt, synthetic construct
  source 1..22: mol_type = other RNA
caggcatccctgtgaaagatgc

SEQ ID NO: 20287 - RNA, 22 nt, synthetic construct
  source 1..22: mol_type = other RNA
caggcatctttcacagggatgc

SEQ ID NO: 20288 - RNA, 22 nt, synthetic construct
  source 1..22: mol_type = other RNA
caggccaagtaggtggcctggg

SEQ ID NO: 20289 - RNA, 22 nt, synthetic construct
  source 1..22: mol_type = other RNA
caggccacctacttggcctgga

SEQ ID NO: 20290 - RNA, 22 nt, synthetic construct
  source 1..22: mol_type = other RNA
caggcccaacccctccccattc

SEQ ID NO: 20291 - RNA, 22 nt, synthetic construct
  source 1..22: mol_type = other RNA
caggcccagccccgcctcccta

SEQ ID NO: 20292 - RNA, 22 nt, synthetic construct
  source 1..22: mol_type = other RNA
caggccccagcccctcctctct

SEQ ID NO: 20293 - RNA, 22 nt, synthetic construct
  source 1..22: mol_type = other RNA
caggccccagcccttccgccct

SEQ ID NO: 20294 - RNA, 22 nt, synthetic construct
  source 1..22: mol_type = other RNA
caggcccccagcctctccccat

SEQ ID NO: 20295 - RNA, 22 nt, synthetic construct
  source 1..22: mol_type = other RNA
caggcccccagctcttctctgt

SEQ ID NO: 20296 - RNA, 22 nt, synthetic construct
  source 1..22: mol_type = other RNA
caggcccccagtccctccaccc

SEQ ID NO: 20297 - RNA, 22 nt, synthetic construct
  source 1..22: mol_type = other RNA
caggcccctgagtctgtcccag

SEQ ID NO: 20298 - RNA, 22 nt, synthetic construct
  source 1..22: mol_type = other RNA
caggccggccaggccttcagtg

SEQ ID NO: 20299 - RNA, 22 nt, synthetic construct
  source 1..22: mol_type = other RNA
caggcctcaggcatctttcaca

SEQ ID NO: 20300 - RNA, 22 nt, synthetic construct
  source 1..22: mol_type = other RNA
caggcctcctgggataccccga

SEQ ID NO: 20301 - RNA, 22 nt, synthetic construct
  source 1..22: mol_type = other RNA
caggccttcagtgctcagtgga

SEQ ID NO: 20302 - RNA, 22 nt, synthetic construct
  source 1..22: mol_type = other RNA
caggccttgtggacactgggtg

SEQ ID NO: 20303 - RNA, 22 nt, synthetic construct
  source 1..22: mol_type = other RNA
caggcgtatcttaaacagccag

SEQ ID NO: 20304 - RNA, 22 nt, synthetic construct
  source 1..22: mol_type = other RNA
caggctgccttttgggtggatt

SEQ ID NO: 20305 - RNA, 22 nt, synthetic construct
  source 1..22: mol_type = other RNA
caggctgtcacactccagttca

SEQ ID NO: 20306 - RNA, 22 nt, synthetic construct
  source 1..22: mol_type = other RNA
caggcttccctgtcccccttcc

SEQ ID NO: 20307 - RNA, 22 nt, synthetic construct
  source 1..22: mol_type = other RNA
cagggaagcctgagcgcctctc

SEQ ID NO: 20308 - RNA, 22 nt, synthetic construct
  source 1..22: mol_type = other RNA
cagggacacggtgctaggacag

SEQ ID NO: 20309 - RNA, 22 nt, synthetic construct
  source 1..22: mol_type = other RNA
cagggactccagagtccaggcc

SEQ ID NO: 20310 - RNA, 22 nt, synthetic construct
  source 1..22: mol_type = other RNA
cagggatgcctgtactgggcag

SEQ ID NO: 20311 - RNA, 22 nt, synthetic construct
  source 1..22: mol_type = other RNA
cagggatggttggtcactgtct

SEQ ID NO: 20312 - RNA, 22 nt, synthetic construct
  source 1..22: mol_type = other RNA
cagggcacgtgcggccccttca

SEQ ID NO: 20313 - RNA, 22 nt, synthetic construct
  source 1..22: mol_type = other RNA
cagggccccgtgcagagggggc

SEQ ID NO: 20314 - RNA, 22 nt, synthetic construct
  source 1..22: mol_type = other RNA
cagggccttagggaagcgggac

SEQ ID NO: 20315 - RNA, 22 nt, synthetic construct
  source 1..22: mol_type = other RNA
cagggctatgcagggtggagga

SEQ ID NO: 20316 - RNA, 22 nt, synthetic construct
  source 1..22: mol_type = other RNA
cagggctggggtggcctctcgt

SEQ ID NO: 20317 - RNA, 22 nt, synthetic construct
  source 1..22: mol_type = other RNA
cagggctgtggtgaggaggggg

SEQ ID NO: 20318 - RNA, 22 nt, synthetic construct
  source 1..22: mol_type = other RNA
caggggaacggggatgcagggg

SEQ ID NO: 20319 - RNA, 22 nt, synthetic construct
  source 1..22: mol_type = other RNA
caggggaacggggctcagtctg

SEQ ID NO: 20320 - RNA, 22 nt, synthetic construct
  source 1..22: mol_type = other RNA
caggggaagggggatgcagggg

SEQ ID NO: 20321 - RNA, 22 nt, synthetic construct
  source 1..22: mol_type = other RNA
caggggagctgggtttgggtca

SEQ ID NO: 20322 - RNA, 22 nt, synthetic construct
  source 1..22: mol_type = other RNA
caggggcatgagatggtggacg

SEQ ID NO: 20323 - RNA, 22 nt, synthetic construct
  source 1..22: mol_type = other RNA
caggggcctgggcgggactccc

SEQ ID NO: 20324 - RNA, 22 nt, synthetic construct
  source 1..22: mol_type = other RNA
caggggctgacacgggccaccg

SEQ ID NO: 20325 - RNA, 22 nt, synthetic construct
  source 1..22: mol_type = other RNA
caggggggcgatgcttggggac

SEQ ID NO: 20326 - RNA, 22 nt, synthetic construct
  source 1..22: mol_type = other RNA
cagggggtcggaggagggactt

SEQ ID NO: 20327 - RNA, 22 nt, synthetic construct
  source 1..22: mol_type = other RNA
caggggtccaggcccagccccg

SEQ ID NO: 20328 - RNA, 22 nt, synthetic construct
  source 1..22: mol_type = other RNA
caggggttcctggctctgctct

SEQ ID NO: 20329 - RNA, 22 nt, synthetic construct
  source 1..22: mol_type = other RNA
cagggtaccagcctcaccaagt

SEQ ID NO: 20330 - RNA, 22 nt, synthetic construct
  source 1..22: mol_type = other RNA
cagggtcccgcttccctaaggc

SEQ ID NO: 20331 - RNA, 22 nt, synthetic construct
  source 1..22: mol_type = other RNA
cagggtggaggaaggccaccct

SEQ ID NO: 20332 - RNA, 22 nt, synthetic construct
  source 1..22: mol_type = other RNA
cagggtggccactgagaaccgg

SEQ ID NO: 20333 - RNA, 22 nt, synthetic construct
  source 1..22: mol_type = other RNA
cagggtggccttcctccaccct

SEQ ID NO: 20334 - RNA, 22 nt, synthetic construct
  source 1..22: mol_type = other RNA
caggtaaaactgacgcacggag

SEQ ID NO: 20335 - RNA, 22 nt, synthetic construct
  source 1..22: mol_type = other RNA
caggtaccatgtggggttcccg

SEQ ID NO: 20336 - RNA, 22 nt, synthetic construct
  source 1..22: mol_type = other RNA
caggtccccaagcatcgccccc

SEQ ID NO: 20337 - RNA, 22 nt, synthetic construct
  source 1..22: mol_type = other RNA
caggtcccggagcccacccagt

SEQ ID NO: 20338 - RNA, 22 nt, synthetic construct
  source 1..22: mol_type = other RNA
caggtccttccaagggtcaagc

SEQ ID NO: 20339 - RNA, 22 nt, synthetic construct
  source 1..22: mol_type = other RNA
caggtccttgaaagggaaaggc

SEQ ID NO: 20340 - RNA, 22 nt, synthetic construct
  source 1..22: mol_type = other RNA
caggtcgtggccgcctctactc

SEQ ID NO: 20341 - RNA, 22 nt, synthetic construct
  source 1..22: mol_type = other RNA
caggtctgggtgtggggtgacc

SEQ ID NO: 20342 - RNA, 22 nt, synthetic construct
  source 1..22: mol_type = other RNA
caggtggagaaactggccggga

SEQ ID NO: 20343 - RNA, 22 nt, synthetic construct
  source 1..22: mol_type = other RNA
caggtggcgcttccagtgctca

SEQ ID NO: 20344 - RNA, 22 nt, synthetic construct
  source 1..22: mol_type = other RNA
caggtgtgcagctgtctcaccc

SEQ ID NO: 20345 - RNA, 22 nt, synthetic construct
  source 1..22: mol_type = other RNA
caggttacgtggccaagaagca

SEQ ID NO: 20346 - RNA, 22 nt, synthetic construct
  source 1..22: mol_type = other RNA
caggttctgggagagggtagcg

SEQ ID NO: 20347 - RNA, 22 nt, synthetic construct
  source 1..22: mol_type = other RNA
cagtacaggcatccctgtgaaa

SEQ ID NO: 20348 - RNA, 22 nt, synthetic construct
  source 1..22: mol_type = other RNA
cagtagccagccccgtcctggc

SEQ ID NO: 20349 - RNA, 22 nt, synthetic construct
  source 1..22: mol_type = other RNA
cagtcaccccacagttggagga

SEQ ID NO: 20350 - RNA, 22 nt, synthetic construct
  source 1..22: mol_type = other RNA
cagtccctccaccctcagaccc

SEQ ID NO: 20351 - RNA, 22 nt, synthetic construct
  source 1..22: mol_type = other RNA
cagtcctaggaaaacagggatg

SEQ ID NO: 20352 - RNA, 22 nt, synthetic construct
  source 1..22: mol_type = other RNA
cagtctgaagagcagagccagg

SEQ ID NO: 20353 - RNA, 22 nt, synthetic construct
  source 1..22: mol_type = other RNA
cagtgaaacgcaccagacggcc

SEQ ID NO: 20354 - RNA, 22 nt, synthetic construct
  source 1..22: mol_type = other RNA
cagtgaactggagtgtgacagc

SEQ ID NO: 20355 - RNA, 22 nt, synthetic construct
  source 1..22: mol_type = other RNA
cagtgaccaaccatccctgttt

SEQ ID NO: 20356 - RNA, 22 nt, synthetic construct
  source 1..22: mol_type = other RNA
cagtgctaaaactaggctgtcc

SEQ ID NO: 20357 - RNA, 22 nt, synthetic construct
  source 1..22: mol_type = other RNA
cagtgctatctgggacatattc

SEQ ID NO: 20358 - RNA, 22 nt, synthetic construct
  source 1..22: mol_type = other RNA
cagtgctcagactagggaagag

SEQ ID NO: 20359 - RNA, 22 nt, synthetic construct
  source 1..22: mol_type = other RNA
cagtgctcagtggaaaccacga

SEQ ID NO: 20360 - RNA, 22 nt, synthetic construct
  source 1..22: mol_type = other RNA
cagtggaaaccacgaaaggact

SEQ ID NO: 20361 - RNA, 22 nt, synthetic construct
  source 1..22: mol_type = other RNA
cagtggccaccctgcgctaccc

SEQ ID NO: 20362 - RNA, 22 nt, synthetic construct
  source 1..22: mol_type = other RNA
cagtggccagaggctgttgggt

SEQ ID NO: 20363 - RNA, 22 nt, synthetic construct
  source 1..22: mol_type = other RNA
cagtggggaaaatgacccaaca

SEQ ID NO: 20364 - RNA, 22 nt, synthetic construct
  source 1..22: mol_type = other RNA
cagtggtcaggccggccaggcc

SEQ ID NO: 20365 - RNA, 22 nt, synthetic construct
  source 1..22: mol_type = other RNA
cagtgtccacaaggcctggggc

SEQ ID NO: 20366 - RNA, 22 nt, synthetic construct
  source 1..22: mol_type = other RNA
cagttcactgaggccccctctg

SEQ ID NO: 20367 - RNA, 22 nt, synthetic construct
  source 1..22: mol_type = other RNA
cagttcaggtcccggagcccac

SEQ ID NO: 20368 - RNA, 22 nt, synthetic construct
  source 1..22: mol_type = other RNA
cagttggaggagaatccaccca

SEQ ID NO: 20369 - RNA, 22 nt, synthetic construct
  source 1..22: mol_type = other RNA
cagttgtcatggcgatagggga

SEQ ID NO: 20370 - RNA, 22 nt, synthetic construct
  source 1..22: mol_type = other RNA
cagtttctccacctggggctgt

SEQ ID NO: 20371 - RNA, 22 nt, synthetic construct
  source 1..22: mol_type = other RNA
cagtttggaaaaacaaaatcag

SEQ ID NO: 20372 - RNA, 22 nt, synthetic construct
  source 1..22: mol_type = other RNA
cagttttacctgtgagataagg

SEQ ID NO: 20373 - RNA, 22 nt, synthetic construct
  source 1..22: mol_type = other RNA
cataagctggtcaccccacacc

SEQ ID NO: 20374 - RNA, 22 nt, synthetic construct
  source 1..22: mol_type = other RNA
catagccctgggcccacggctt

SEQ ID NO: 20375 - RNA, 22 nt, synthetic construct
  source 1..22: mol_type = other RNA
catattcctccgcccagagcag

SEQ ID NO: 20376 - RNA, 22 nt, synthetic construct
  source 1..22: mol_type = other RNA
catcccccagaggccccaggcc

SEQ ID NO: 20377 - RNA, 22 nt, synthetic construct
  source 1..22: mol_type = other RNA
catcccccttcccctgcatccc

SEQ ID NO: 20378 - RNA, 22 nt, synthetic construct
  source 1..22: mol_type = other RNA
catccccgttcccctgcatccc

SEQ ID NO: 20379 - RNA, 22 nt, synthetic construct
  source 1..22: mol_type = other RNA
catcccgttcccagggcacgtg

SEQ ID NO: 20380 - RNA, 22 nt, synthetic construct
  source 1..22: mol_type = other RNA
catccctgtgaaagatgcctga

SEQ ID NO: 20381 - RNA, 22 nt, synthetic construct
  source 1..22: mol_type = other RNA
catccctgttttcctaggactg

SEQ ID NO: 20382 - RNA, 22 nt, synthetic construct
  source 1..22: mol_type = other RNA
catccttctccaggcaggtccc

SEQ ID NO: 20383 - RNA, 22 nt, synthetic construct
  source 1..22: mol_type = other RNA
catccttctttccttaaagagt

SEQ ID NO: 20384 - RNA, 22 nt, synthetic construct
  source 1..22: mol_type = other RNA
catcgcccccctgctgtggctg

SEQ ID NO: 20385 - RNA, 22 nt, synthetic construct
  source 1..22: mol_type = other RNA
catctcatgcccctggctctcc

SEQ ID NO: 20386 - RNA, 22 nt, synthetic construct
  source 1..22: mol_type = other RNA
catctgagggcggaagggctgg

SEQ ID NO: 20387 - RNA, 22 nt, synthetic construct
  source 1..22: mol_type = other RNA
catctggaggaggcgggaggga

SEQ ID NO: 20388 - RNA, 22 nt, synthetic construct
  source 1..22: mol_type = other RNA
catctgggtgcgggaaccccac

SEQ ID NO: 20389 - RNA, 22 nt, synthetic construct
  source 1..22: mol_type = other RNA
catctttcacagggatgcctgt

SEQ ID NO: 20390 - RNA, 22 nt, synthetic construct
  source 1..22: mol_type = other RNA
catgacaactgggtggaaataa

SEQ ID NO: 20391 - RNA, 22 nt, synthetic construct
  source 1..22: mol_type = other RNA
catgacctcatgctcttggccc

SEQ ID NO: 20392 - RNA, 22 nt, synthetic construct
  source 1..22: mol_type = other RNA
catgagatggtggacgaggaag

SEQ ID NO: 20393 - RNA, 22 nt, synthetic construct
  source 1..22: mol_type = other RNA
catgaggtcatggaaactcggg

SEQ ID NO: 20394 - RNA, 22 nt, synthetic construct
  source 1..22: mol_type = other RNA
catgcccctggctctcctgccc

SEQ ID NO: 20395 - RNA, 22 nt, synthetic construct
  source 1..22: mol_type = other RNA
catgctcttggccctcgtagct

SEQ ID NO: 20396 - RNA, 22 nt, synthetic construct
  source 1..22: mol_type = other RNA
catggaaactcgggctgtgaag

SEQ ID NO: 20397 - RNA, 22 nt, synthetic construct
  source 1..22: mol_type = other RNA
catggcgataggggaggggggc

SEQ ID NO: 20398 - RNA, 22 nt, synthetic construct
  source 1..22: mol_type = other RNA
catggtacctgttagacacggc

SEQ ID NO: 20399 - RNA, 22 nt, synthetic construct
  source 1..22: mol_type = other RNA
catgtggggttcccgcacccag

SEQ ID NO: 20400 - RNA, 22 nt, synthetic construct
  source 1..22: mol_type = other RNA
cattcaacccaggaggccaggc

SEQ ID NO: 20401 - RNA, 22 nt, synthetic construct
  source 1..22: mol_type = other RNA
cattcagacccaggggtccagg

SEQ ID NO: 20402 - RNA, 22 nt, synthetic construct
  source 1..22: mol_type = other RNA
cattcctgcaccccaattgcct

SEQ ID NO: 20403 - RNA, 22 nt, synthetic construct
  source 1..22: mol_type = other RNA
cattctcacaaagggagttttc

SEQ ID NO: 20404 - RNA, 22 nt, synthetic construct
  source 1..22: mol_type = other RNA
cattcttcccttaggggtccaa

SEQ ID NO: 20405 - RNA, 22 nt, synthetic construct
  source 1..22: mol_type = other RNA
cattgctctccttgcccccctc

SEQ ID NO: 20406 - RNA, 22 nt, synthetic construct
  source 1..22: mol_type = other RNA
cattggggtgggctggggttca

SEQ ID NO: 20407 - RNA, 22 nt, synthetic construct
  source 1..22: mol_type = other RNA
cattttccccactgtcctagca

SEQ ID NO: 20408 - RNA, 22 nt, synthetic construct
  source 1..22: mol_type = other RNA
ccaaaacttggggggacaaaag

SEQ ID NO: 20409 - RNA, 22 nt, synthetic construct
  source 1..22: mol_type = other RNA
ccaaaaggcagcctggtagaca

SEQ ID NO: 20410 - RNA, 22 nt, synthetic construct
  source 1..22: mol_type = other RNA
ccaaacccagctcccctgcttc

SEQ ID NO: 20411 - RNA, 22 nt, synthetic construct
  source 1..22: mol_type = other RNA
ccaaactgcttctcctcttggg

SEQ ID NO: 20412 - RNA, 22 nt, synthetic construct
  source 1..22: mol_type = other RNA
ccaaagctgcccatctggagga

SEQ ID NO: 20413 - RNA, 22 nt, synthetic construct
  source 1..22: mol_type = other RNA
ccaaagttagaactcaggacca

SEQ ID NO: 20414 - RNA, 22 nt, synthetic construct
  source 1..22: mol_type = other RNA
ccaacagcctctggccactggc

SEQ ID NO: 20415 - RNA, 22 nt, synthetic construct
  source 1..22: mol_type = other RNA
ccaaccatccctgttttcctag

SEQ ID NO: 20416 - RNA, 22 nt, synthetic construct
  source 1..22: mol_type = other RNA
ccaaccccctagccactaaggc

SEQ ID NO: 20417 - RNA, 22 nt, synthetic construct
  source 1..22: mol_type = other RNA
ccaacccctccccattcaaccc

SEQ ID NO: 20418 - RNA, 22 nt, synthetic construct
  source 1..22: mol_type = other RNA
ccaactgtggggtgactgcttg

SEQ ID NO: 20419 - RNA, 22 nt, synthetic construct
  source 1..22: mol_type = other RNA
ccaacttattctgattttgttt

SEQ ID NO: 20420 - RNA, 22 nt, synthetic construct
  source 1..22: mol_type = other RNA
ccaagaagcaggggagctgggt

SEQ ID NO: 20421 - RNA, 22 nt, synthetic construct
  source 1..22: mol_type = other RNA
ccaagagcatgaggtcatggaa

SEQ ID NO: 20422 - RNA, 22 nt, synthetic construct
  source 1..22: mol_type = other RNA
ccaagaggagaagcagtttgga

SEQ ID NO: 20423 - RNA, 22 nt, synthetic construct
  source 1..22: mol_type = other RNA
ccaagcagtcaccccacagttg

SEQ ID NO: 20424 - RNA, 22 nt, synthetic construct
  source 1..22: mol_type = other RNA
ccaagcatcgcccccctgctgt

SEQ ID NO: 20425 - RNA, 22 nt, synthetic construct
  source 1..22: mol_type = other RNA
ccaaggactcaaacccagaagc

SEQ ID NO: 20426 - RNA, 22 nt, synthetic construct
  source 1..22: mol_type = other RNA
ccaagggtcaagctcggaaacc

SEQ ID NO: 20427 - RNA, 22 nt, synthetic construct
  source 1..22: mol_type = other RNA
ccaagtaggtggcctggggcct

SEQ ID NO: 20428 - RNA, 22 nt, synthetic construct
  source 1..22: mol_type = other RNA
ccaagtccctcacctctccaaa

SEQ ID NO: 20429 - RNA, 22 nt, synthetic construct
  source 1..22: mol_type = other RNA
ccaagtggttgataaacccacg

SEQ ID NO: 20430 - RNA, 22 nt, synthetic construct
  source 1..22: mol_type = other RNA
ccaagttcttagggtaccccac

SEQ ID NO: 20431 - RNA, 22 nt, synthetic construct
  source 1..22: mol_type = other RNA
ccaagttttggacccctaaggg

SEQ ID NO: 20432 - RNA, 22 nt, synthetic construct
  source 1..22: mol_type = other RNA
ccaatgctccaggcctcctggg

SEQ ID NO: 20433 - RNA, 22 nt, synthetic construct
  source 1..22: mol_type = other RNA
ccaattgccttagtggctaggg

SEQ ID NO: 20434 - RNA, 22 nt, synthetic construct
  source 1..22: mol_type = other RNA
ccaatttatattgttcctccgt

SEQ ID NO: 20435 - RNA, 22 nt, synthetic construct
  source 1..22: mol_type = other RNA
ccacaaggcctggggcaagtcc

SEQ ID NO: 20436 - RNA, 22 nt, synthetic construct
  source 1..22: mol_type = other RNA
ccacacccagacctgacccaaa

SEQ ID NO: 20437 - RNA, 22 nt, synthetic construct
  source 1..22: mol_type = other RNA
ccacacggacacccccctcctc

SEQ ID NO: 20438 - RNA, 22 nt, synthetic construct
  source 1..22: mol_type = other RNA
ccacagcaggggggcgatgctt

SEQ ID NO: 20439 - RNA, 22 nt, synthetic construct
  source 1..22: mol_type = other RNA
ccacagccctgccaggacgggg

SEQ ID NO: 20440 - RNA, 22 nt, synthetic construct
  source 1..22: mol_type = other RNA
ccacaggtggcgcttccagtgc

SEQ ID NO: 20441 - RNA, 22 nt, synthetic construct
  source 1..22: mol_type = other RNA
ccacagttggaggagaatccac

SEQ ID NO: 20442 - RNA, 22 nt, synthetic construct
  source 1..22: mol_type = other RNA
ccacatggtacctgttagacac

SEQ ID NO: 20443 - RNA, 22 nt, synthetic construct
  source 1..22: mol_type = other RNA
ccaccatctcatgcccctggct

SEQ ID NO: 20444 - RNA, 22 nt, synthetic construct
  source 1..22: mol_type = other RNA
ccacccaaaaggcagcctggta

SEQ ID NO: 20445 - RNA, 22 nt, synthetic construct
  source 1..22: mol_type = other RNA
ccacccacaggtggcgcttcca

SEQ ID NO: 20446 - RNA, 22 nt, synthetic construct
  source 1..22: mol_type = other RNA
ccacccagtgtccacaaggcct

SEQ ID NO: 20447 - RNA, 22 nt, synthetic construct
  source 1..22: mol_type = other RNA
ccacccagttgtcatggcgata

SEQ ID NO: 20448 - RNA, 22 nt, synthetic construct
  source 1..22: mol_type = other RNA
ccaccccaatgctccaggcctc

SEQ ID NO: 20449 - RNA, 22 nt, synthetic construct
  source 1..22: mol_type = other RNA
ccaccccagcagatactctgca

SEQ ID NO: 20450 - RNA, 22 nt, synthetic construct
  source 1..22: mol_type = other RNA
ccaccccagccctgtctaccag

SEQ ID NO: 20451 - RNA, 22 nt, synthetic construct
  source 1..22: mol_type = other RNA
ccaccctcagacccaggagtcc

SEQ ID NO: 20452 - RNA, 22 nt, synthetic construct
  source 1..22: mol_type = other RNA
ccaccctgcatagccctgggcc

SEQ ID NO: 20453 - RNA, 22 nt, synthetic construct
  source 1..22: mol_type = other RNA
ccaccctgcgctaccctctccc

SEQ ID NO: 20454 - RNA, 22 nt, synthetic construct
  source 1..22: mol_type = other RNA
ccaccctgtgctgggacagact

SEQ ID NO: 20455 - RNA, 22 nt, synthetic construct
  source 1..22: mol_type = other RNA
ccaccgtttctcattcttccct

SEQ ID NO: 20456 - RNA, 22 nt, synthetic construct
  source 1..22: mol_type = other RNA
ccacctacttggcctggacccc

SEQ ID NO: 20457 - RNA, 22 nt, synthetic construct
  source 1..22: mol_type = other RNA
ccacctggggctgtgtttctcg

SEQ ID NO: 20458 - RNA, 22 nt, synthetic construct
  source 1..22: mol_type = other RNA
ccacctgtgggtggtgacgggg

SEQ ID NO: 20459 - RNA, 22 nt, synthetic construct
  source 1..22: mol_type = other RNA
ccacgaaaacagatccagggac

SEQ ID NO: 20460 - RNA, 22 nt, synthetic construct
  source 1..22: mol_type = other RNA
ccacgaaaggactcctggctat

SEQ ID NO: 20461 - RNA, 22 nt, synthetic construct
  source 1..22: mol_type = other RNA
ccacgacctggtgaacacctag

SEQ ID NO: 20462 - RNA, 22 nt, synthetic construct
  source 1..22: mol_type = other RNA
ccacgagaggccaccccagccc

SEQ ID NO: 20463 - RNA, 22 nt, synthetic construct
  source 1..22: mol_type = other RNA
ccacgagtccaggccccagccc

SEQ ID NO: 20464 - RNA, 22 nt, synthetic construct
  source 1..22: mol_type = other RNA
ccacggcttcgttcctgcagag

SEQ ID NO: 20465 - RNA, 22 nt, synthetic construct
  source 1..22: mol_type = other RNA
ccacgggataaattacccccca

SEQ ID NO: 20466 - RNA, 22 nt, synthetic construct
  source 1..22: mol_type = other RNA
ccacggtgtcccagcaagtcgg

SEQ ID NO: 20467 - RNA, 22 nt, synthetic construct
  source 1..22: mol_type = other RNA
ccacgtaacctgagaagggaat

SEQ ID NO: 20468 - RNA, 22 nt, synthetic construct
  source 1..22: mol_type = other RNA
ccacgtggggtaccctaagaac

SEQ ID NO: 20469 - RNA, 22 nt, synthetic construct
  source 1..22: mol_type = other RNA
ccacgtgggtttatcaaccact

SEQ ID NO: 20470 - RNA, 22 nt, synthetic construct
  source 1..22: mol_type = other RNA
ccactaaggcaattggggtgca

SEQ ID NO: 20471 - RNA, 22 nt, synthetic construct
  source 1..22: mol_type = other RNA
ccactgagaaccgggcaggtca

SEQ ID NO: 20472 - RNA, 22 nt, synthetic construct
  source 1..22: mol_type = other RNA
ccactgagcactgaaggcctgg

SEQ ID NO: 20473 - RNA, 22 nt, synthetic construct
  source 1..22: mol_type = other RNA
ccactggctgtttaagatacgc

SEQ ID NO: 20474 - RNA, 22 nt, synthetic construct
  source 1..22: mol_type = other RNA
ccactgggcaaccaggcgtatc

SEQ ID NO: 20475 - RNA, 22 nt, synthetic construct
  source 1..22: mol_type = other RNA
ccactgtcctagcaccgtgtcc

SEQ ID NO: 20476 - RNA, 22 nt, synthetic construct
  source 1..22: mol_type = other RNA
ccacttggtgaggctggtaccc

SEQ ID NO: 20477 - RNA, 22 nt, synthetic construct
  source 1..22: mol_type = other RNA
ccagaacctgagctgctctgac

SEQ ID NO: 20478 - RNA, 22 nt, synthetic construct
  source 1..22: mol_type = other RNA
ccagaagcccagagcagggcct

SEQ ID NO: 20479 - RNA, 22 nt, synthetic construct
  source 1..22: mol_type = other RNA
ccagacctgacccaaacccagc

SEQ ID NO: 20480 - RNA, 22 nt, synthetic construct
  source 1..22: mol_type = other RNA
ccagacggccgcgtcagagcag

SEQ ID NO: 20481 - RNA, 22 nt, synthetic construct
  source 1..22: mol_type = other RNA
ccagagacagtgaccaaccatc

SEQ ID NO: 20482 - RNA, 22 nt, synthetic construct
  source 1..22: mol_type = other RNA
ccagagcagggccttagggaag

SEQ ID NO: 20483 - RNA, 22 nt, synthetic construct
  source 1..22: mol_type = other RNA
ccagagcagggtcccgcttccc

SEQ ID NO: 20484 - RNA, 22 nt, synthetic construct
  source 1..22: mol_type = other RNA
ccagaggccccaggccacctac

SEQ ID NO: 20485 - RNA, 22 nt, synthetic construct
  source 1..22: mol_type = other RNA
ccagaggctgttgggtcatttt

SEQ ID NO: 20486 - RNA, 22 nt, synthetic construct
  source 1..22: mol_type = other RNA
ccagagggagccacgaaaacag

SEQ ID NO: 20487 - RNA, 22 nt, synthetic construct
  source 1..22: mol_type = other RNA
ccagaggggtgagacagctgca

SEQ ID NO: 20488 - RNA, 22 nt, synthetic construct
  source 1..22: mol_type = other RNA
ccagagtccaggcccaacccct

SEQ ID NO: 20489 - RNA, 22 nt, synthetic construct
  source 1..22: mol_type = other RNA
ccagatagcactggggactctt

SEQ ID NO: 20490 - RNA, 22 nt, synthetic construct
  source 1..22: mol_type = other RNA
ccagatgagaagccccctccct

SEQ ID NO: 20491 - RNA, 22 nt, synthetic construct
  source 1..22: mol_type = other RNA
ccagatgggcagctttggagag

SEQ ID NO: 20492 - RNA, 22 nt, synthetic construct
  source 1..22: mol_type = other RNA
ccagcaagtcgggactccagag

SEQ ID NO: 20493 - RNA, 22 nt, synthetic construct
  source 1..22: mol_type = other RNA
ccagcacagggtggccttcctc

SEQ ID NO: 20494 - RNA, 22 nt, synthetic construct
  source 1..22: mol_type = other RNA
ccagcagatactctgcaggaac

SEQ ID NO: 20495 - RNA, 22 nt, synthetic construct
  source 1..22: mol_type = other RNA
ccagccaggtccttccaagggt

SEQ ID NO: 20496 - RNA, 22 nt, synthetic construct
  source 1..22: mol_type = other RNA
ccagcccaccccaatgctccag

SEQ ID NO: 20497 - RNA, 22 nt, synthetic construct
  source 1..22: mol_type = other RNA
ccagccccgcctccctaagacc

SEQ ID NO: 20498 - RNA, 22 nt, synthetic construct
  source 1..22: mol_type = other RNA
ccagccccgtcctggcagggct

SEQ ID NO: 20499 - RNA, 22 nt, synthetic construct
  source 1..22: mol_type = other RNA
ccagcccctcctactctagccc

SEQ ID NO: 20500 - RNA, 22 nt, synthetic construct
  source 1..22: mol_type = other RNA
ccagcccctcctccctcagacc

SEQ ID NO: 20501 - RNA, 22 nt, synthetic construct
  source 1..22: mol_type = other RNA
ccagcccctcctccttcagagc

SEQ ID NO: 20502 - RNA, 22 nt, synthetic construct
  source 1..22: mol_type = other RNA
ccagcccctcctctctcaaacc

SEQ ID NO: 20503 - RNA, 22 nt, synthetic construct
  source 1..22: mol_type = other RNA
ccagcccctcctgccttaaacc

SEQ ID NO: 20504 - RNA, 22 nt, synthetic construct
  source 1..22: mol_type = other RNA
ccagccctgtctaccaggctgc

SEQ ID NO: 20505 - RNA, 22 nt, synthetic construct
  source 1..22: mol_type = other RNA
ccagcccttccgccctcagatg

SEQ ID NO: 20506 - RNA, 22 nt, synthetic construct
  source 1..22: mol_type = other RNA
ccagcctcaccaagtggttgat

SEQ ID NO: 20507 - RNA, 22 nt, synthetic construct
  source 1..22: mol_type = other RNA
ccagcctctccccattcagacc

SEQ ID NO: 20508 - RNA, 22 nt, synthetic construct
  source 1..22: mol_type = other RNA
ccagctcccctgcttcttggcc

SEQ ID NO: 20509 - RNA, 22 nt, synthetic construct
  source 1..22: mol_type = other RNA
ccagctcttctctgttcagccc

SEQ ID NO: 20510 - RNA, 22 nt, synthetic construct
  source 1..22: mol_type = other RNA
ccagcttatgctgtttgcccag

SEQ ID NO: 20511 - RNA, 22 nt, synthetic construct
  source 1..22: mol_type = other RNA
ccaggaacccctgtagggaagg

SEQ ID NO: 20512 - RNA, 22 nt, synthetic construct
  source 1..22: mol_type = other RNA
ccaggacagcctagttttagca

SEQ ID NO: 20513 - RNA, 22 nt, synthetic construct
  source 1..22: mol_type = other RNA
ccaggacggggctggctactgg

SEQ ID NO: 20514 - RNA, 22 nt, synthetic construct
  source 1..22: mol_type = other RNA
ccaggactcctggctctgaagg

SEQ ID NO: 20515 - RNA, 22 nt, synthetic construct
  source 1..22: mol_type = other RNA
ccaggagaggcgctcaggcttc

SEQ ID NO: 20516 - RNA, 22 nt, synthetic construct
  source 1..22: mol_type = other RNA
ccaggagcccaggcccccagct

SEQ ID NO: 20517 - RNA, 22 nt, synthetic construct
  source 1..22: mol_type = other RNA
ccaggaggccaggccccagccc

SEQ ID NO: 20518 - RNA, 22 nt, synthetic construct
  source 1..22: mol_type = other RNA
ccaggaggcctggagcattggg

SEQ ID NO: 20519 - RNA, 22 nt, synthetic construct
  source 1..22: mol_type = other RNA
ccaggagtccaggcccccagtc

SEQ ID NO: 20520 - RNA, 22 nt, synthetic construct
  source 1..22: mol_type = other RNA
ccaggagtcctggcccccagcc

SEQ ID NO: 20521 - RNA, 22 nt, synthetic construct
  source 1..22: mol_type = other RNA
ccaggagtcctttcgtggtttc

SEQ ID NO: 20522 - RNA, 22 nt, synthetic construct
  source 1..22: mol_type = other RNA
ccaggatcagtgaaacgcacca

SEQ ID NO: 20523 - RNA, 22 nt, synthetic construct
  source 1..22: mol_type = other RNA
ccaggattcttagggctgaaca

SEQ ID NO: 20524 - RNA, 22 nt, synthetic construct
  source 1..22: mol_type = other RNA
ccaggcacacaggtgtgcagct

SEQ ID NO: 20525 - RNA, 22 nt, synthetic construct
  source 1..22: mol_type = other RNA
ccaggcaggtccccaagcatcg

SEQ ID NO: 20526 - RNA, 22 nt, synthetic construct
  source 1..22: mol_type = other RNA
ccaggccaagtaggtggcctgg

SEQ ID NO: 20527 - RNA, 22 nt, synthetic construct
  source 1..22: mol_type = other RNA
ccaggccacctacttggcctgg

SEQ ID NO: 20528 - RNA, 22 nt, synthetic construct
  source 1..22: mol_type = other RNA
ccaggcccaacccctccccatt

SEQ ID NO: 20529 - RNA, 22 nt, synthetic construct
  source 1..22: mol_type = other RNA
ccaggcccagccccgcctccct

SEQ ID NO: 20530 - RNA, 22 nt, synthetic construct
  source 1..22: mol_type = other RNA
ccaggccccagcccctcctctc

SEQ ID NO: 20531 - RNA, 22 nt, synthetic construct
  source 1..22: mol_type = other RNA
ccaggccccagcccttccgccc

SEQ ID NO: 20532 - RNA, 22 nt, synthetic construct
  source 1..22: mol_type = other RNA
ccaggcccccagcctctcccca

SEQ ID NO: 20533 - RNA, 22 nt, synthetic construct
  source 1..22: mol_type = other RNA
ccaggcccccagctcttctctg

SEQ ID NO: 20534 - RNA, 22 nt, synthetic construct
  source 1..22: mol_type = other RNA
ccaggcccccagtccctccacc

SEQ ID NO: 20535 - RNA, 22 nt, synthetic construct
  source 1..22: mol_type = other RNA
ccaggcccctgagtctgtccca

SEQ ID NO: 20536 - RNA, 22 nt, synthetic construct
  source 1..22: mol_type = other RNA
ccaggcctcaggcatctttcac

SEQ ID NO: 20537 - RNA, 22 nt, synthetic construct
  source 1..22: mol_type = other RNA
ccaggcctcctgggataccccg

SEQ ID NO: 20538 - RNA, 22 nt, synthetic construct
  source 1..22: mol_type = other RNA
ccaggccttcagtgctcagtgg

SEQ ID NO: 20539 - RNA, 22 nt, synthetic construct
  source 1..22: mol_type = other RNA
ccaggccttgtggacactgggt

SEQ ID NO: 20540 - RNA, 22 nt, synthetic construct
  source 1..22: mol_type = other RNA
ccaggcgtatcttaaacagcca

SEQ ID NO: 20541 - RNA, 22 nt, synthetic construct
  source 1..22: mol_type = other RNA
ccaggctgccttttgggtggat

SEQ ID NO: 20542 - RNA, 22 nt, synthetic construct
  source 1..22: mol_type = other RNA
ccaggctgtcacactccagttc

SEQ ID NO: 20543 - RNA, 22 nt, synthetic construct
  source 1..22: mol_type = other RNA
ccagggacacggtgctaggaca

SEQ ID NO: 20544 - RNA, 22 nt, synthetic construct
  source 1..22: mol_type = other RNA
ccagggactccagagtccaggc

SEQ ID NO: 20545 - RNA, 22 nt, synthetic construct
  source 1..22: mol_type = other RNA
ccagggcacgtgcggccccttc

SEQ ID NO: 20546 - RNA, 22 nt, synthetic construct
  source 1..22: mol_type = other RNA
ccagggctatgcagggtggagg

SEQ ID NO: 20547 - RNA, 22 nt, synthetic construct
  source 1..22: mol_type = other RNA
ccaggggcatgagatggtggac

SEQ ID NO: 20548 - RNA, 22 nt, synthetic construct
  source 1..22: mol_type = other RNA
ccaggggctgacacgggccacc

SEQ ID NO: 20549 - RNA, 22 nt, synthetic construct
  source 1..22: mol_type = other RNA
ccagggggtcggaggagggact

SEQ ID NO: 20550 - RNA, 22 nt, synthetic construct
  source 1..22: mol_type = other RNA
ccaggggtccaggcccagcccc

SEQ ID NO: 20551 - RNA, 22 nt, synthetic construct
  source 1..22: mol_type = other RNA
ccaggtccttccaagggtcaag

SEQ ID NO: 20552 - RNA, 22 nt, synthetic construct
  source 1..22: mol_type = other RNA
ccaggtcgtggccgcctctact

SEQ ID NO: 20553 - RNA, 22 nt, synthetic construct
  source 1..22: mol_type = other RNA
ccaggtggagaaactggccggg

SEQ ID NO: 20554 - RNA, 22 nt, synthetic construct
  source 1..22: mol_type = other RNA
ccagtacaggcatccctgtgaa

SEQ ID NO: 20555 - RNA, 22 nt, synthetic construct
  source 1..22: mol_type = other RNA
ccagtagccagccccgtcctgg

SEQ ID NO: 20556 - RNA, 22 nt, synthetic construct
  source 1..22: mol_type = other RNA
ccagtccctccaccctcagacc

SEQ ID NO: 20557 - RNA, 22 nt, synthetic construct
  source 1..22: mol_type = other RNA
ccagtgctatctgggacatatt

SEQ ID NO: 20558 - RNA, 22 nt, synthetic construct
  source 1..22: mol_type = other RNA
ccagtgctcagactagggaaga

SEQ ID NO: 20559 - RNA, 22 nt, synthetic construct
  source 1..22: mol_type = other RNA
ccagtggccagaggctgttggg

SEQ ID NO: 20560 - RNA, 22 nt, synthetic construct
  source 1..22: mol_type = other RNA
ccagtggtcaggccggccaggc

SEQ ID NO: 20561 - RNA, 22 nt, synthetic construct
  source 1..22: mol_type = other RNA
ccagtgtccacaaggcctgggg

SEQ ID NO: 20562 - RNA, 22 nt, synthetic construct
  source 1..22: mol_type = other RNA
ccagttcactgaggccccctct

SEQ ID NO: 20563 - RNA, 22 nt, synthetic construct
  source 1..22: mol_type = other RNA
ccagttcaggtcccggagccca

SEQ ID NO: 20564 - RNA, 22 nt, synthetic construct
  source 1..22: mol_type = other RNA
ccagttgtcatggcgatagggg

SEQ ID NO: 20565 - RNA, 22 nt, synthetic construct
  source 1..22: mol_type = other RNA
ccagtttctccacctggggctg

SEQ ID NO: 20566 - RNA, 22 nt, synthetic construct
  source 1..22: mol_type = other RNA
ccatccctgttttcctaggact

SEQ ID NO: 20567 - RNA, 22 nt, synthetic construct
  source 1..22: mol_type = other RNA
ccatccttctttccttaaagag

SEQ ID NO: 20568 - RNA, 22 nt, synthetic construct
  source 1..22: mol_type = other RNA
ccatctcatgcccctggctctc

SEQ ID NO: 20569 - RNA, 22 nt, synthetic construct
  source 1..22: mol_type = other RNA
ccatctggaggaggcgggaggg

SEQ ID NO: 20570 - RNA, 22 nt, synthetic construct
  source 1..22: mol_type = other RNA
ccatgacaactgggtggaaata

SEQ ID NO: 20571 - RNA, 22 nt, synthetic construct
  source 1..22: mol_type = other RNA
ccatgacctcatgctcttggcc

SEQ ID NO: 20572 - RNA, 22 nt, synthetic construct
  source 1..22: mol_type = other RNA
ccatgtggggttcccgcaccca

SEQ ID NO: 20573 - RNA, 22 nt, synthetic construct
  source 1..22: mol_type = other RNA
ccattcaacccaggaggccagg

SEQ ID NO: 20574 - RNA, 22 nt, synthetic construct
  source 1..22: mol_type = other RNA
ccattcagacccaggggtccag

SEQ ID NO: 20575 - RNA, 22 nt, synthetic construct
  source 1..22: mol_type = other RNA
ccattcctgcaccccaattgcc

SEQ ID NO: 20576 - RNA, 22 nt, synthetic construct
  source 1..22: mol_type = other RNA
ccattctcacaaagggagtttt

SEQ ID NO: 20577 - RNA, 22 nt, synthetic construct
  source 1..22: mol_type = other RNA
ccattgctctccttgcccccct

SEQ ID NO: 20578 - RNA, 22 nt, synthetic construct
  source 1..22: mol_type = other RNA
cccaaaaggcagcctggtagac

SEQ ID NO: 20579 - RNA, 22 nt, synthetic construct
  source 1..22: mol_type = other RNA
cccaaacccagctcccctgctt

SEQ ID NO: 20580 - RNA, 22 nt, synthetic construct
  source 1..22: mol_type = other RNA
cccaacagcctctggccactgg

SEQ ID NO: 20581 - RNA, 22 nt, synthetic construct
  source 1..22: mol_type = other RNA
cccaaccccctagccactaagg

SEQ ID NO: 20582 - RNA, 22 nt, synthetic construct
  source 1..22: mol_type = other RNA
cccaacccctccccattcaacc

SEQ ID NO: 20583 - RNA, 22 nt, synthetic construct
  source 1..22: mol_type = other RNA
cccaagaggagaagcagtttgg

SEQ ID NO: 20584 - RNA, 22 nt, synthetic construct
  source 1..22: mol_type = other RNA
cccaagcatcgcccccctgctg

SEQ ID NO: 20585 - RNA, 22 nt, synthetic construct
  source 1..22: mol_type = other RNA
cccaagtccctcacctctccaa

SEQ ID NO: 20586 - RNA, 22 nt, synthetic construct
  source 1..22: mol_type = other RNA
cccaagttcttagggtacccca

SEQ ID NO: 20587 - RNA, 22 nt, synthetic construct
  source 1..22: mol_type = other RNA
cccaagttttggacccctaagg

SEQ ID NO: 20588 - RNA, 22 nt, synthetic construct
  source 1..22: mol_type = other RNA
cccaatgctccaggcctcctgg

SEQ ID NO: 20589 - RNA, 22 nt, synthetic construct
  source 1..22: mol_type = other RNA
cccaattgccttagtggctagg

SEQ ID NO: 20590 - RNA, 22 nt, synthetic construct
  source 1..22: mol_type = other RNA
cccaatttatattgttcctccg

SEQ ID NO: 20591 - RNA, 22 nt, synthetic construct
  source 1..22: mol_type = other RNA
cccacacccagacctgacccaa

SEQ ID NO: 20592 - RNA, 22 nt, synthetic construct
  source 1..22: mol_type = other RNA
cccacaggtggcgcttccagtg

SEQ ID NO: 20593 - RNA, 22 nt, synthetic construct
  source 1..22: mol_type = other RNA
cccacagttggaggagaatcca

SEQ ID NO: 20594 - RNA, 22 nt, synthetic construct
  source 1..22: mol_type = other RNA
cccacatggtacctgttagaca

SEQ ID NO: 20595 - RNA, 22 nt, synthetic construct
  source 1..22: mol_type = other RNA
cccacccagtgtccacaaggcc

SEQ ID NO: 20596 - RNA, 22 nt, synthetic construct
  source 1..22: mol_type = other RNA
cccaccccaatgctccaggcct

SEQ ID NO: 20597 - RNA, 22 nt, synthetic construct
  source 1..22: mol_type = other RNA
cccacgagaggccaccccagcc

SEQ ID NO: 20598 - RNA, 22 nt, synthetic construct
  source 1..22: mol_type = other RNA
cccacgagtccaggccccagcc

SEQ ID NO: 20599 - RNA, 22 nt, synthetic construct
  source 1..22: mol_type = other RNA
cccacggcttcgttcctgcaga

SEQ ID NO: 20600 - RNA, 22 nt, synthetic construct
  source 1..22: mol_type = other RNA
cccacgtggggtaccctaagaa

SEQ ID NO: 20601 - RNA, 22 nt, synthetic construct
  source 1..22: mol_type = other RNA
cccacgtgggtttatcaaccac

SEQ ID NO: 20602 - RNA, 22 nt, synthetic construct
  source 1..22: mol_type = other RNA
cccactgtcctagcaccgtgtc

SEQ ID NO: 20603 - RNA, 22 nt, synthetic construct
  source 1..22: mol_type = other RNA
cccagaacctgagctgctctga

SEQ ID NO: 20604 - RNA, 22 nt, synthetic construct
  source 1..22: mol_type = other RNA
cccagaagcccagagcagggcc

SEQ ID NO: 20605 - RNA, 22 nt, synthetic construct
  source 1..22: mol_type = other RNA
cccagacctgacccaaacccag

SEQ ID NO: 20606 - RNA, 22 nt, synthetic construct
  source 1..22: mol_type = other RNA
cccagagacagtgaccaaccat

SEQ ID NO: 20607 - RNA, 22 nt, synthetic construct
  source 1..22: mol_type = other RNA
cccagagcagggccttagggaa

SEQ ID NO: 20608 - RNA, 22 nt, synthetic construct
  source 1..22: mol_type = other RNA
cccagagcagggtcccgcttcc

SEQ ID NO: 20609 - RNA, 22 nt, synthetic construct
  source 1..22: mol_type = other RNA
cccagaggccccaggccaccta

SEQ ID NO: 20610 - RNA, 22 nt, synthetic construct
  source 1..22: mol_type = other RNA
cccagaggggtgagacagctgc

SEQ ID NO: 20611 - RNA, 22 nt, synthetic construct
  source 1..22: mol_type = other RNA
cccagatagcactggggactct

SEQ ID NO: 20612 - RNA, 22 nt, synthetic construct
  source 1..22: mol_type = other RNA
cccagatgagaagccccctccc

SEQ ID NO: 20613 - RNA, 22 nt, synthetic construct
  source 1..22: mol_type = other RNA
cccagcaagtcgggactccaga

SEQ ID NO: 20614 - RNA, 22 nt, synthetic construct
  source 1..22: mol_type = other RNA
cccagcacagggtggccttcct

SEQ ID NO: 20615 - RNA, 22 nt, synthetic construct
  source 1..22: mol_type = other RNA
cccagcagatactctgcaggaa

SEQ ID NO: 20616 - RNA, 22 nt, synthetic construct
  source 1..22: mol_type = other RNA
cccagccaggtccttccaaggg

SEQ ID NO: 20617 - RNA, 22 nt, synthetic construct
  source 1..22: mol_type = other RNA
cccagcccaccccaatgctcca

SEQ ID NO: 20618 - RNA, 22 nt, synthetic construct
  source 1..22: mol_type = other RNA
cccagccccgcctccctaagac

SEQ ID NO: 20619 - RNA, 22 nt, synthetic construct
  source 1..22: mol_type = other RNA
cccagcccctcctccctcagac

SEQ ID NO: 20620 - RNA, 22 nt, synthetic construct
  source 1..22: mol_type = other RNA
cccagcccctcctctctcaaac

SEQ ID NO: 20621 - RNA, 22 nt, synthetic construct
  source 1..22: mol_type = other RNA
cccagcccctcctgccttaaac

SEQ ID NO: 20622 - RNA, 22 nt, synthetic construct
  source 1..22: mol_type = other RNA
cccagccctgtctaccaggctg

SEQ ID NO: 20623 - RNA, 22 nt, synthetic construct
  source 1..22: mol_type = other RNA
cccagcccttccgccctcagat

SEQ ID NO: 20624 - RNA, 22 nt, synthetic construct
  source 1..22: mol_type = other RNA
cccagcctctccccattcagac

SEQ ID NO: 20625 - RNA, 22 nt, synthetic construct
  source 1..22: mol_type = other RNA
cccagctcccctgcttcttggc

SEQ ID NO: 20626 - RNA, 22 nt, synthetic construct
  source 1..22: mol_type = other RNA
cccagctcttctctgttcagcc

SEQ ID NO: 20627 - RNA, 22 nt, synthetic construct
  source 1..22: mol_type = other RNA
cccaggacagcctagttttagc

SEQ ID NO: 20628 - RNA, 22 nt, synthetic construct
  source 1..22: mol_type = other RNA
cccaggagaggcgctcaggctt

SEQ ID NO: 20629 - RNA, 22 nt, synthetic construct
  source 1..22: mol_type = other RNA
cccaggagcccaggcccccagc

SEQ ID NO: 20630 - RNA, 22 nt, synthetic construct
  source 1..22: mol_type = other RNA
cccaggaggccaggccccagcc

SEQ ID NO: 20631 - RNA, 22 nt, synthetic construct
  source 1..22: mol_type = other RNA
cccaggaggcctggagcattgg

SEQ ID NO: 20632 - RNA, 22 nt, synthetic construct
  source 1..22: mol_type = other RNA
cccaggagtccaggcccccagt

SEQ ID NO: 20633 - RNA, 22 nt, synthetic construct
  source 1..22: mol_type = other RNA
cccaggcacacaggtgtgcagc

SEQ ID NO: 20634 - RNA, 22 nt, synthetic construct
  source 1..22: mol_type = other RNA
cccaggccacctacttggcctg

SEQ ID NO: 20635 - RNA, 22 nt, synthetic construct
  source 1..22: mol_type = other RNA
cccaggcccccagctcttctct

SEQ ID NO: 20636 - RNA, 22 nt, synthetic construct
  source 1..22: mol_type = other RNA
cccaggcccctgagtctgtccc

SEQ ID NO: 20637 - RNA, 22 nt, synthetic construct
  source 1..22: mol_type = other RNA
cccaggcctcaggcatctttca

SEQ ID NO: 20638 - RNA, 22 nt, synthetic construct
  source 1..22: mol_type = other RNA
cccaggccttgtggacactggg

SEQ ID NO: 20639 - RNA, 22 nt, synthetic construct
  source 1..22: mol_type = other RNA
cccaggctgtcacactccagtt

SEQ ID NO: 20640 - RNA, 22 nt, synthetic construct
  source 1..22: mol_type = other RNA
cccagggcacgtgcggcccctt

SEQ ID NO: 20641 - RNA, 22 nt, synthetic construct
  source 1..22: mol_type = other RNA
cccagggctatgcagggtggag

SEQ ID NO: 20642 - RNA, 22 nt, synthetic construct
  source 1..22: mol_type = other RNA
cccaggtggagaaactggccgg

SEQ ID NO: 20643 - RNA, 22 nt, synthetic construct
  source 1..22: mol_type = other RNA
cccagtacaggcatccctgtga

SEQ ID NO: 20644 - RNA, 22 nt, synthetic construct
  source 1..22: mol_type = other RNA
cccagtccctccaccctcagac

SEQ ID NO: 20645 - RNA, 22 nt, synthetic construct
  source 1..22: mol_type = other RNA
cccagtgctatctgggacatat

SEQ ID NO: 20646 - RNA, 22 nt, synthetic construct
  source 1..22: mol_type = other RNA
cccagtggtcaggccggccagg

SEQ ID NO: 20647 - RNA, 22 nt, synthetic construct
  source 1..22: mol_type = other RNA
cccagtgtccacaaggcctggg

SEQ ID NO: 20648 - RNA, 22 nt, synthetic construct
  source 1..22: mol_type = other RNA
cccagttgtcatggcgataggg

SEQ ID NO: 20649 - RNA, 22 nt, synthetic construct
  source 1..22: mol_type = other RNA
cccatctggaggaggcgggagg

SEQ ID NO: 20650 - RNA, 22 nt, synthetic construct
  source 1..22: mol_type = other RNA
cccattcaacccaggaggccag

SEQ ID NO: 20651 - RNA, 22 nt, synthetic construct
  source 1..22: mol_type = other RNA
cccattcagacccaggggtcca

SEQ ID NO: 20652 - RNA, 22 nt, synthetic construct
  source 1..22: mol_type = other RNA
cccattcctgcaccccaattgc

SEQ ID NO: 20653 - RNA, 22 nt, synthetic construct
  source 1..22: mol_type = other RNA
cccattgctctccttgcccccc

SEQ ID NO: 20654 - RNA, 22 nt, synthetic construct
  source 1..22: mol_type = other RNA
ccccaaccccctagccactaag

SEQ ID NO: 20655 - RNA, 22 nt, synthetic construct
  source 1..22: mol_type = other RNA
ccccaagcatcgcccccctgct

SEQ ID NO: 20656 - RNA, 22 nt, synthetic construct
  source 1..22: mol_type = other RNA
ccccaagtccctcacctctcca

SEQ ID NO: 20657 - RNA, 22 nt, synthetic construct
  source 1..22: mol_type = other RNA
ccccaagttttggacccctaag

SEQ ID NO: 20658 - RNA, 22 nt, synthetic construct
  source 1..22: mol_type = other RNA
ccccaatgctccaggcctcctg

SEQ ID NO: 20659 - RNA, 22 nt, synthetic construct
  source 1..22: mol_type = other RNA
ccccaattgccttagtggctag

SEQ ID NO: 20660 - RNA, 22 nt, synthetic construct
  source 1..22: mol_type = other RNA
ccccaatttatattgttcctcc

SEQ ID NO: 20661 - RNA, 22 nt, synthetic construct
  source 1..22: mol_type = other RNA
ccccacacccagacctgaccca

SEQ ID NO: 20662 - RNA, 22 nt, synthetic construct
  source 1..22: mol_type = other RNA
ccccacagttggaggagaatcc

SEQ ID NO: 20663 - RNA, 22 nt, synthetic construct
  source 1..22: mol_type = other RNA
ccccacatggtacctgttagac

SEQ ID NO: 20664 - RNA, 22 nt, synthetic construct
  source 1..22: mol_type = other RNA
ccccacgagaggccaccccagc

SEQ ID NO: 20665 - RNA, 22 nt, synthetic construct
  source 1..22: mol_type = other RNA
ccccacgtgggtttatcaacca

SEQ ID NO: 20666 - RNA, 22 nt, synthetic construct
  source 1..22: mol_type = other RNA
ccccactgtcctagcaccgtgt

SEQ ID NO: 20667 - RNA, 22 nt, synthetic construct
  source 1..22: mol_type = other RNA
ccccagaggccccaggccacct

SEQ ID NO: 20668 - RNA, 22 nt, synthetic construct
  source 1..22: mol_type = other RNA
ccccagcagatactctgcagga

SEQ ID NO: 20669 - RNA, 22 nt, synthetic construct
  source 1..22: mol_type = other RNA
ccccagcccaccccaatgctcc

SEQ ID NO: 20670 - RNA, 22 nt, synthetic construct
  source 1..22: mol_type = other RNA
ccccagcccctcctccctcaga

SEQ ID NO: 20671 - RNA, 22 nt, synthetic construct
  source 1..22: mol_type = other RNA
ccccagcccctcctctctcaaa

SEQ ID NO: 20672 - RNA, 22 nt, synthetic construct
  source 1..22: mol_type = other RNA
ccccagcccctcctgccttaaa

SEQ ID NO: 20673 - RNA, 22 nt, synthetic construct
  source 1..22: mol_type = other RNA
ccccagccctgtctaccaggct

SEQ ID NO: 20674 - RNA, 22 nt, synthetic construct
  source 1..22: mol_type = other RNA
ccccagcccttccgccctcaga

SEQ ID NO: 20675 - RNA, 22 nt, synthetic construct
  source 1..22: mol_type = other RNA
ccccagcctctccccattcaga

SEQ ID NO: 20676 - RNA, 22 nt, synthetic construct
  source 1..22: mol_type = other RNA
ccccagctcttctctgttcagc

SEQ ID NO: 20677 - RNA, 22 nt, synthetic construct
  source 1..22: mol_type = other RNA
ccccaggccacctacttggcct

SEQ ID NO: 20678 - RNA, 22 nt, synthetic construct
  source 1..22: mol_type = other RNA
ccccaggccttgtggacactgg

SEQ ID NO: 20679 - RNA, 22 nt, synthetic construct
  source 1..22: mol_type = other RNA
ccccaggctgtcacactccagt

SEQ ID NO: 20680 - RNA, 22 nt, synthetic construct
  source 1..22: mol_type = other RNA
ccccaggtggagaaactggccg

SEQ ID NO: 20681 - RNA, 22 nt, synthetic construct
  source 1..22: mol_type = other RNA
ccccagtccctccaccctcaga

SEQ ID NO: 20682 - RNA, 22 nt, synthetic construct
  source 1..22: mol_type = other RNA
ccccagtgctatctgggacata

SEQ ID NO: 20683 - RNA, 22 nt, synthetic construct
  source 1..22: mol_type = other RNA
ccccattcaacccaggaggcca

SEQ ID NO: 20684 - RNA, 22 nt, synthetic construct
  source 1..22: mol_type = other RNA
ccccattcagacccaggggtcc

SEQ ID NO: 20685 - RNA, 22 nt, synthetic construct
  source 1..22: mol_type = other RNA
ccccattcctgcaccccaattg

SEQ ID NO: 20686 - RNA, 22 nt, synthetic construct
  source 1..22: mol_type = other RNA
cccccaaccccctagccactaa

SEQ ID NO: 20687 - RNA, 22 nt, synthetic construct
  source 1..22: mol_type = other RNA
cccccaagtccctcacctctcc

SEQ ID NO: 20688 - RNA, 22 nt, synthetic construct
  source 1..22: mol_type = other RNA
cccccaagttttggacccctaa

SEQ ID NO: 20689 - RNA, 22 nt, synthetic construct
  source 1..22: mol_type = other RNA
cccccagaggccccaggccacc

SEQ ID NO: 20690 - RNA, 22 nt, synthetic construct
  source 1..22: mol_type = other RNA
cccccagcccctcctccctcag

SEQ ID NO: 20691 - RNA, 22 nt, synthetic construct
  source 1..22: mol_type = other RNA
cccccagcccctcctgccttaa

SEQ ID NO: 20692 - RNA, 22 nt, synthetic construct
  source 1..22: mol_type = other RNA
cccccagcctctccccattcag

SEQ ID NO: 20693 - RNA, 22 nt, synthetic construct
  source 1..22: mol_type = other RNA
cccccagctcttctctgttcag

SEQ ID NO: 20694 - RNA, 22 nt, synthetic construct
  source 1..22: mol_type = other RNA
cccccagtccctccaccctcag

SEQ ID NO: 20695 - RNA, 22 nt, synthetic construct
  source 1..22: mol_type = other RNA
cccccattcctgcaccccaatt

SEQ ID NO: 20696 - RNA, 22 nt, synthetic construct
  source 1..22: mol_type = other RNA
ccccccaagtccctcacctctc

SEQ ID NO: 20697 - RNA, 22 nt, synthetic construct
  source 1..22: mol_type = other RNA
ccccccaagttttggaccccta

SEQ ID NO: 20698 - RNA, 22 nt, synthetic construct
  source 1..22: mol_type = other RNA
cccccctcccctatcgccatga

SEQ ID NO: 20699 - RNA, 22 nt, synthetic construct
  source 1..22: mol_type = other RNA
cccccctcctcaccacagccct

SEQ ID NO: 20700 - RNA, 22 nt, synthetic construct
  source 1..22: mol_type = other RNA
cccccctgctgtggctgttccc

SEQ ID NO: 20701 - RNA, 22 nt, synthetic construct
  source 1..22: mol_type = other RNA
cccccgtcaccacccacaggtg

SEQ ID NO: 20702 - RNA, 22 nt, synthetic construct
  source 1..22: mol_type = other RNA
ccccctagccactaaggcaatt

SEQ ID NO: 20703 - RNA, 22 nt, synthetic construct
  source 1..22: mol_type = other RNA
ccccctcccctatcgccatgac

SEQ ID NO: 20704 - RNA, 22 nt, synthetic construct
  source 1..22: mol_type = other RNA
ccccctcccttccccgttcact

SEQ ID NO: 20705 - RNA, 22 nt, synthetic construct
  source 1..22: mol_type = other RNA
ccccctcctcaccacagccctg

SEQ ID NO: 20706 - RNA, 22 nt, synthetic construct
  source 1..22: mol_type = other RNA
ccccctctgcacggggccctgc

SEQ ID NO: 20707 - RNA, 22 nt, synthetic construct
  source 1..22: mol_type = other RNA
ccccctgctgtggctgttccca

SEQ ID NO: 20708 - RNA, 22 nt, synthetic construct
  source 1..22: mol_type = other RNA
ccccctggacttcggcttttgt

SEQ ID NO: 20709 - RNA, 22 nt, synthetic construct
  source 1..22: mol_type = other RNA
cccccttcccctgcatccccca

SEQ ID NO: 20710 - RNA, 22 nt, synthetic construct
  source 1..22: mol_type = other RNA
cccccttcctcgtccaccatct

SEQ ID NO: 20711 - RNA, 22 nt, synthetic construct
  source 1..22: mol_type = other RNA
ccccgaagagtgagtttgccaa

SEQ ID NO: 20712 - RNA, 22 nt, synthetic construct
  source 1..22: mol_type = other RNA
ccccgcctccctaagacccaga

SEQ ID NO: 20713 - RNA, 22 nt, synthetic construct
  source 1..22: mol_type = other RNA
ccccgtcaccacccacaggtgg

SEQ ID NO: 20714 - RNA, 22 nt, synthetic construct
  source 1..22: mol_type = other RNA
ccccgtcctggcagggctgtgg

SEQ ID NO: 20715 - RNA, 22 nt, synthetic construct
  source 1..22: mol_type = other RNA
ccccgtgcagagggggcctcag

SEQ ID NO: 20716 - RNA, 22 nt, synthetic construct
  source 1..22: mol_type = other RNA
ccccgttcacttcctgtttgca

SEQ ID NO: 20717 - RNA, 22 nt, synthetic construct
  source 1..22: mol_type = other RNA
ccccgttcccctgcatccccct

SEQ ID NO: 20718 - RNA, 22 nt, synthetic construct
  source 1..22: mol_type = other RNA
ccccgttcccctgcatccccgt

SEQ ID NO: 20719 - RNA, 22 nt, synthetic construct
  source 1..22: mol_type = other RNA
cccctaagggaagaatgagaaa

SEQ ID NO: 20720 - RNA, 22 nt, synthetic construct
  source 1..22: mol_type = other RNA
cccctagccactaaggcaattg

SEQ ID NO: 20721 - RNA, 22 nt, synthetic construct
  source 1..22: mol_type = other RNA
cccctatcgccatgacaactgg

SEQ ID NO: 20722 - RNA, 22 nt, synthetic construct
  source 1..22: mol_type = other RNA
cccctccccattcaacccagga

SEQ ID NO: 20723 - RNA, 22 nt, synthetic construct
  source 1..22: mol_type = other RNA
cccctcccctatcgccatgaca

SEQ ID NO: 20724 - RNA, 22 nt, synthetic construct
  source 1..22: mol_type = other RNA
cccctcccttccccgttcactt

SEQ ID NO: 20725 - RNA, 22 nt, synthetic construct
  source 1..22: mol_type = other RNA
cccctcctactctagcccccaa

SEQ ID NO: 20726 - RNA, 22 nt, synthetic construct
  source 1..22: mol_type = other RNA
cccctcctcaccacagccctgc

SEQ ID NO: 20727 - RNA, 22 nt, synthetic construct
  source 1..22: mol_type = other RNA
cccctcctccttcagagccagg

SEQ ID NO: 20728 - RNA, 22 nt, synthetic construct
  source 1..22: mol_type = other RNA
cccctcctctctcaaacccagg

SEQ ID NO: 20729 - RNA, 22 nt, synthetic construct
  source 1..22: mol_type = other RNA
cccctcctgccttaaacccagc

SEQ ID NO: 20730 - RNA, 22 nt, synthetic construct
  source 1..22: mol_type = other RNA
cccctctgcacggggccctgca

SEQ ID NO: 20731 - RNA, 22 nt, synthetic construct
  source 1..22: mol_type = other RNA
cccctctgggagtcccgcccag

SEQ ID NO: 20732 - RNA, 22 nt, synthetic construct
  source 1..22: mol_type = other RNA
cccctgagtctgtcccagcaca

SEQ ID NO: 20733 - RNA, 22 nt, synthetic construct
  source 1..22: mol_type = other RNA
cccctgcatcccccagaggccc

SEQ ID NO: 20734 - RNA, 22 nt, synthetic construct
  source 1..22: mol_type = other RNA
cccctgcatcccccttcccctg

SEQ ID NO: 20735 - RNA, 22 nt, synthetic construct
  source 1..22: mol_type = other RNA
cccctgcatccccgttcccctg

SEQ ID NO: 20736 - RNA, 22 nt, synthetic construct
  source 1..22: mol_type = other RNA
cccctgctgtggctgttcccaa

SEQ ID NO: 20737 - RNA, 22 nt, synthetic construct
  source 1..22: mol_type = other RNA
cccctgcttcttggccacgtaa

SEQ ID NO: 20738 - RNA, 22 nt, synthetic construct
  source 1..22: mol_type = other RNA
cccctggacttcggcttttgtc

SEQ ID NO: 20739 - RNA, 22 nt, synthetic construct
  source 1..22: mol_type = other RNA
cccctggctctcctgccccttc

SEQ ID NO: 20740 - RNA, 22 nt, synthetic construct
  source 1..22: mol_type = other RNA
cccctggctgcagggccccgtg

SEQ ID NO: 20741 - RNA, 22 nt, synthetic construct
  source 1..22: mol_type = other RNA
cccctgggtctgaatggggaga

SEQ ID NO: 20742 - RNA, 22 nt, synthetic construct
  source 1..22: mol_type = other RNA
cccctgtagggaaggggcagga

SEQ ID NO: 20743 - RNA, 22 nt, synthetic construct
  source 1..22: mol_type = other RNA
ccccttcacagcccgagtttcc

SEQ ID NO: 20744 - RNA, 22 nt, synthetic construct
  source 1..22: mol_type = other RNA
ccccttcccctgcatcccccag

SEQ ID NO: 20745 - RNA, 22 nt, synthetic construct
  source 1..22: mol_type = other RNA
ccccttccctacaggggttcct

SEQ ID NO: 20746 - RNA, 22 nt, synthetic construct
  source 1..22: mol_type = other RNA
ccccttcctcgtccaccatctc

SEQ ID NO: 20747 - RNA, 22 nt, synthetic construct
  source 1..22: mol_type = other RNA
cccgaagagtgagtttgccaag

SEQ ID NO: 20748 - RNA, 22 nt, synthetic construct
  source 1..22: mol_type = other RNA
cccgagtttccatgacctcatg

SEQ ID NO: 20749 - RNA, 22 nt, synthetic construct
  source 1..22: mol_type = other RNA
cccgcacccagatgagaagccc

SEQ ID NO: 20750 - RNA, 22 nt, synthetic construct
  source 1..22: mol_type = other RNA
cccgcccaggcccctgagtctg

SEQ ID NO: 20751 - RNA, 22 nt, synthetic construct
  source 1..22: mol_type = other RNA
cccgcctccctaagacccagaa

SEQ ID NO: 20752 - RNA, 22 nt, synthetic construct
  source 1..22: mol_type = other RNA
cccgcctcctccagatgggcag

SEQ ID NO: 20753 - RNA, 22 nt, synthetic construct
  source 1..22: mol_type = other RNA
cccgcttccctaaggccctgct

SEQ ID NO: 20754 - RNA, 22 nt, synthetic construct
  source 1..22: mol_type = other RNA
cccggagcccacccagtgtcca

SEQ ID NO: 20755 - RNA, 22 nt, synthetic construct
  source 1..22: mol_type = other RNA
cccggccagtttctccacctgg

SEQ ID NO: 20756 - RNA, 22 nt, synthetic construct
  source 1..22: mol_type = other RNA
cccggttctcagtggccaccct

SEQ ID NO: 20757 - RNA, 22 nt, synthetic construct
  source 1..22: mol_type = other RNA
cccgtcaccacccacaggtggc

SEQ ID NO: 20758 - RNA, 22 nt, synthetic construct
  source 1..22: mol_type = other RNA
cccgtcctggcagggctgtggt

SEQ ID NO: 20759 - RNA, 22 nt, synthetic construct
  source 1..22: mol_type = other RNA
cccgtgcagagggggcctcagt

SEQ ID NO: 20760 - RNA, 22 nt, synthetic construct
  source 1..22: mol_type = other RNA
cccgtggatctaggagtttagc

SEQ ID NO: 20761 - RNA, 22 nt, synthetic construct
  source 1..22: mol_type = other RNA
cccgtgtcagcccctggctgca

SEQ ID NO: 20762 - RNA, 22 nt, synthetic construct
  source 1..22: mol_type = other RNA
cccgttcacttcctgtttgcag

SEQ ID NO: 20763 - RNA, 22 nt, synthetic construct
  source 1..22: mol_type = other RNA
cccgttcccagggcacgtgcgg

SEQ ID NO: 20764 - RNA, 22 nt, synthetic construct
  source 1..22: mol_type = other RNA
cccgttcccctgcatccccctt

SEQ ID NO: 20765 - RNA, 22 nt, synthetic construct
  source 1..22: mol_type = other RNA
cccgttcccctgcatccccgtt

SEQ ID NO: 20766 - RNA, 22 nt, synthetic construct
  source 1..22: mol_type = other RNA
ccctaagaacttgggaacagcc

SEQ ID NO: 20767 - RNA, 22 nt, synthetic construct
  source 1..22: mol_type = other RNA
ccctaagaatcctggctccagc

SEQ ID NO: 20768 - RNA, 22 nt, synthetic construct
  source 1..22: mol_type = other RNA
ccctaagacccagaagtccagg

SEQ ID NO: 20769 - RNA, 22 nt, synthetic construct
  source 1..22: mol_type = other RNA
ccctaaggccctgctctgggct

SEQ ID NO: 20770 - RNA, 22 nt, synthetic construct
  source 1..22: mol_type = other RNA
ccctaagggaagaatgagaaac

SEQ ID NO: 20771 - RNA, 22 nt, synthetic construct
  source 1..22: mol_type = other RNA
ccctacaggggttcctggctct

SEQ ID NO: 20772 - RNA, 22 nt, synthetic construct
  source 1..22: mol_type = other RNA
ccctagccactaaggcaattgg

SEQ ID NO: 20773 - RNA, 22 nt, synthetic construct
  source 1..22: mol_type = other RNA
ccctagtctgagcactggaagc

SEQ ID NO: 20774 - RNA, 22 nt, synthetic construct
  source 1..22: mol_type = other RNA
ccctatcgccatgacaactggg

SEQ ID NO: 20775 - RNA, 22 nt, synthetic construct
  source 1..22: mol_type = other RNA
ccctcacctctccaaagctgcc

SEQ ID NO: 20776 - RNA, 22 nt, synthetic construct
  source 1..22: mol_type = other RNA
ccctcagacccacgagtccagg

SEQ ID NO: 20777 - RNA, 22 nt, synthetic construct
  source 1..22: mol_type = other RNA
ccctcagatgaaggagtccagg

SEQ ID NO: 20778 - RNA, 22 nt, synthetic construct
  source 1..22: mol_type = other RNA
ccctcagtcctaggaaaacagg

SEQ ID NO: 20779 - RNA, 22 nt, synthetic construct
  source 1..22: mol_type = other RNA
ccctccccattcaacccaggag

SEQ ID NO: 20780 - RNA, 22 nt, synthetic construct
  source 1..22: mol_type = other RNA
ccctcccctatcgccatgacaa

SEQ ID NO: 20781 - RNA, 22 nt, synthetic construct
  source 1..22: mol_type = other RNA
ccctcccgcctcctccagatgg

SEQ ID NO: 20782 - RNA, 22 nt, synthetic construct
  source 1..22: mol_type = other RNA
ccctcccttccccgttcacttc

SEQ ID NO: 20783 - RNA, 22 nt, synthetic construct
  source 1..22: mol_type = other RNA
ccctcctactctagcccccaac

SEQ ID NO: 20784 - RNA, 22 nt, synthetic construct
  source 1..22: mol_type = other RNA
ccctcctcaccacagccctgcc

SEQ ID NO: 20785 - RNA, 22 nt, synthetic construct
  source 1..22: mol_type = other RNA
ccctcctccgaccccctggact

SEQ ID NO: 20786 - RNA, 22 nt, synthetic construct
  source 1..22: mol_type = other RNA
ccctcctccttcagagccagga

SEQ ID NO: 20787 - RNA, 22 nt, synthetic construct
  source 1..22: mol_type = other RNA
ccctcctctctcaaacccagga

SEQ ID NO: 20788 - RNA, 22 nt, synthetic construct
  source 1..22: mol_type = other RNA
ccctcctctctgaaccccagcc

SEQ ID NO: 20789 - RNA, 22 nt, synthetic construct
  source 1..22: mol_type = other RNA
ccctcctgccttaaacccagcc

SEQ ID NO: 20790 - RNA, 22 nt, synthetic construct
  source 1..22: mol_type = other RNA
ccctcggacccaggagtccagg

SEQ ID NO: 20791 - RNA, 22 nt, synthetic construct
  source 1..22: mol_type = other RNA
ccctcgtagctccctcccgcct

SEQ ID NO: 20792 - RNA, 22 nt, synthetic construct
  source 1..22: mol_type = other RNA
ccctctcccagaacctgagctg

SEQ ID NO: 20793 - RNA, 22 nt, synthetic construct
  source 1..22: mol_type = other RNA
ccctctgcacggggccctgcag

SEQ ID NO: 20794 - RNA, 22 nt, synthetic construct
  source 1..22: mol_type = other RNA
ccctctggagtcccgacttgct

SEQ ID NO: 20795 - RNA, 22 nt, synthetic construct
  source 1..22: mol_type = other RNA
ccctctgggagtcccgcccagg

SEQ ID NO: 20796 - RNA, 22 nt, synthetic construct
  source 1..22: mol_type = other RNA
ccctgagtctgtcccagcacag

SEQ ID NO: 20797 - RNA, 22 nt, synthetic construct
  source 1..22: mol_type = other RNA
ccctgcagccaggggctgacac

SEQ ID NO: 20798 - RNA, 22 nt, synthetic construct
  source 1..22: mol_type = other RNA
ccctgcatagccctgggcccac

SEQ ID NO: 20799 - RNA, 22 nt, synthetic construct
  source 1..22: mol_type = other RNA
ccctgcatcccccagaggcccc

SEQ ID NO: 20800 - RNA, 22 nt, synthetic construct
  source 1..22: mol_type = other RNA
ccctgcatcccccttcccctgc

SEQ ID NO: 20801 - RNA, 22 nt, synthetic construct
  source 1..22: mol_type = other RNA
ccctgcatccccgttcccctgc

SEQ ID NO: 20802 - RNA, 22 nt, synthetic construct
  source 1..22: mol_type = other RNA
ccctgccaggacggggctggct

SEQ ID NO: 20803 - RNA, 22 nt, synthetic construct
  source 1..22: mol_type = other RNA
ccctgcccccattcctgcaccc

SEQ ID NO: 20804 - RNA, 22 nt, synthetic construct
  source 1..22: mol_type = other RNA
ccctgcgctaccctctcccaga

SEQ ID NO: 20805 - RNA, 22 nt, synthetic construct
  source 1..22: mol_type = other RNA
ccctgctctgggcggaggaata

SEQ ID NO: 20806 - RNA, 22 nt, synthetic construct
  source 1..22: mol_type = other RNA
ccctgctctgggcttctgggtt

SEQ ID NO: 20807 - RNA, 22 nt, synthetic construct
  source 1..22: mol_type = other RNA
ccctgctgtggctgttcccaag

SEQ ID NO: 20808 - RNA, 22 nt, synthetic construct
  source 1..22: mol_type = other RNA
ccctgcttcttggccacgtaac

SEQ ID NO: 20809 - RNA, 22 nt, synthetic construct
  source 1..22: mol_type = other RNA
ccctggacttcggcttttgtcc

SEQ ID NO: 20810 - RNA, 22 nt, synthetic construct
  source 1..22: mol_type = other RNA
ccctggatctgttttcgtggct

SEQ ID NO: 20811 - RNA, 22 nt, synthetic construct
  source 1..22: mol_type = other RNA
ccctggctctcctgccccttcc

SEQ ID NO: 20812 - RNA, 22 nt, synthetic construct
  source 1..22: mol_type = other RNA
ccctggctgcagggccccgtgc

SEQ ID NO: 20813 - RNA, 22 nt, synthetic construct
  source 1..22: mol_type = other RNA
ccctgggaacgggatgaactcg

SEQ ID NO: 20814 - RNA, 22 nt, synthetic construct
  source 1..22: mol_type = other RNA
ccctgggcccacggcttcgttc

SEQ ID NO: 20815 - RNA, 22 nt, synthetic construct
  source 1..22: mol_type = other RNA
ccctgggtctgaatggggagag

SEQ ID NO: 20816 - RNA, 22 nt, synthetic construct
  source 1..22: mol_type = other RNA
ccctggtgcccaggcctcaggc

SEQ ID NO: 20817 - RNA, 22 nt, synthetic construct
  source 1..22: mol_type = other RNA
ccctgtagggaaggggcaggag

SEQ ID NO: 20818 - RNA, 22 nt, synthetic construct
  source 1..22: mol_type = other RNA
ccctgtcccccttcctcgtcca

SEQ ID NO: 20819 - RNA, 22 nt, synthetic construct
  source 1..22: mol_type = other RNA
ccctgtctaccaggctgccttt

SEQ ID NO: 20820 - RNA, 22 nt, synthetic construct
  source 1..22: mol_type = other RNA
ccctgtgaaagatgcctgaggc

SEQ ID NO: 20821 - RNA, 22 nt, synthetic construct
  source 1..22: mol_type = other RNA
ccctgtgctgggacagactcag

SEQ ID NO: 20822 - RNA, 22 nt, synthetic construct
  source 1..22: mol_type = other RNA
ccctgttttcctaggactgagg

SEQ ID NO: 20823 - RNA, 22 nt, synthetic construct
  source 1..22: mol_type = other RNA
cccttaggggtccaaaacttgg

SEQ ID NO: 20824 - RNA, 22 nt, synthetic construct
  source 1..22: mol_type = other RNA
cccttcacagcccgagtttcca

SEQ ID NO: 20825 - RNA, 22 nt, synthetic construct
  source 1..22: mol_type = other RNA
cccttccccgttcacttcctgt

SEQ ID NO: 20826 - RNA, 22 nt, synthetic construct
  source 1..22: mol_type = other RNA
cccttcccctgcatcccccaga

SEQ ID NO: 20827 - RNA, 22 nt, synthetic construct
  source 1..22: mol_type = other RNA
cccttccctacaggggttcctg

SEQ ID NO: 20828 - RNA, 22 nt, synthetic construct
  source 1..22: mol_type = other RNA
cccttccgccctcagatgaagg

SEQ ID NO: 20829 - RNA, 22 nt, synthetic construct
  source 1..22: mol_type = other RNA
cccttcctcgtccaccatctca

SEQ ID NO: 20830 - RNA, 22 nt, synthetic construct
  source 1..22: mol_type = other RNA
cccttctcaggttacgtggcca

SEQ ID NO: 20831 - RNA, 22 nt, synthetic construct
  source 1..22: mol_type = other RNA
cccttggaaggacctggctggg

SEQ ID NO: 20832 - RNA, 22 nt, synthetic construct
  source 1..22: mol_type = other RNA
ccctttcaaggacctgcccagt

SEQ ID NO: 20833 - RNA, 22 nt, synthetic construct
  source 1..22: mol_type = other RNA
ccctttctctttctccatcctt

SEQ ID NO: 20834 - RNA, 22 nt, synthetic construct
  source 1..22: mol_type = other RNA
ccctttgtgagaatggtgcgtc

SEQ ID NO: 20835 - RNA, 22 nt, synthetic construct
  source 1..22: mol_type = other RNA
ccgaagagtgagtttgccaagc

SEQ ID NO: 20836 - RNA, 22 nt, synthetic construct
  source 1..22: mol_type = other RNA
ccgaagtccagggggtcggagg

SEQ ID NO: 20837 - RNA, 22 nt, synthetic construct
  source 1..22: mol_type = other RNA
ccgaccccctggacttcggctt

SEQ ID NO: 20838 - RNA, 22 nt, synthetic construct
  source 1..22: mol_type = other RNA
ccgagcttgacccttggaagga

SEQ ID NO: 20839 - RNA, 22 nt, synthetic construct
  source 1..22: mol_type = other RNA
ccgagttcatcccgttcccagg

SEQ ID NO: 20840 - RNA, 22 nt, synthetic construct
  source 1..22: mol_type = other RNA
ccgagtttccatgacctcatgc

SEQ ID NO: 20841 - RNA, 22 nt, synthetic construct
  source 1..22: mol_type = other RNA
ccgcacccagatgagaagcccc

SEQ ID NO: 20842 - RNA, 22 nt, synthetic construct
  source 1..22: mol_type = other RNA
ccgcacgtgccctgggaacggg

SEQ ID NO: 20843 - RNA, 22 nt, synthetic construct
  source 1..22: mol_type = other RNA
ccgcccagagcagggtcccgct

SEQ ID NO: 20844 - RNA, 22 nt, synthetic construct
  source 1..22: mol_type = other RNA
ccgcccaggcccctgagtctgt

SEQ ID NO: 20845 - RNA, 22 nt, synthetic construct
  source 1..22: mol_type = other RNA
ccgccctcagatgaaggagtcc

SEQ ID NO: 20846 - RNA, 22 nt, synthetic construct
  source 1..22: mol_type = other RNA
ccgcctccctaagacccagaag

SEQ ID NO: 20847 - RNA, 22 nt, synthetic construct
  source 1..22: mol_type = other RNA
ccgcctcctccagatgggcagc

SEQ ID NO: 20848 - RNA, 22 nt, synthetic construct
  source 1..22: mol_type = other RNA
ccgcctctactccctttctctt

SEQ ID NO: 20849 - RNA, 22 nt, synthetic construct
  source 1..22: mol_type = other RNA
ccgcgtcagagcagctcaggtt

SEQ ID NO: 20850 - RNA, 22 nt, synthetic construct
  source 1..22: mol_type = other RNA
ccgcttccctaaggccctgctc

SEQ ID NO: 20851 - RNA, 22 nt, synthetic construct
  source 1..22: mol_type = other RNA
ccggagcccacccagtgtccac

SEQ ID NO: 20852 - RNA, 22 nt, synthetic construct
  source 1..22: mol_type = other RNA
ccggccaggccttcagtgctca

SEQ ID NO: 20853 - RNA, 22 nt, synthetic construct
  source 1..22: mol_type = other RNA
ccggccagtttctccacctggg

SEQ ID NO: 20854 - RNA, 22 nt, synthetic construct
  source 1..22: mol_type = other RNA
ccggcctgaccactgggcaacc

SEQ ID NO: 20855 - RNA, 22 nt, synthetic construct
  source 1..22: mol_type = other RNA
ccgggaatcaagagtcacccag

SEQ ID NO: 20856 - RNA, 22 nt, synthetic construct
  source 1..22: mol_type = other RNA
ccgggacctgaactggagctga

SEQ ID NO: 20857 - RNA, 22 nt, synthetic construct
  source 1..22: mol_type = other RNA
ccggttctcagtggccaccctg

SEQ ID NO: 20858 - RNA, 22 nt, synthetic construct
  source 1..22: mol_type = other RNA
ccgtcaccacccacaggtggcg

SEQ ID NO: 20859 - RNA, 22 nt, synthetic construct
  source 1..22: mol_type = other RNA
ccgtcctggcagggctgtggtg

SEQ ID NO: 20860 - RNA, 22 nt, synthetic construct
  source 1..22: mol_type = other RNA
ccgtctggtgcgtttcactgat

SEQ ID NO: 20861 - RNA, 22 nt, synthetic construct
  source 1..22: mol_type = other RNA
ccgtgcagagggggcctcagtg

SEQ ID NO: 20862 - RNA, 22 nt, synthetic construct
  source 1..22: mol_type = other RNA
ccgtgcgtcagttttacctgtg

SEQ ID NO: 20863 - RNA, 22 nt, synthetic construct
  source 1..22: mol_type = other RNA
ccgtggatctaggagtttagct

SEQ ID NO: 20864 - RNA, 22 nt, synthetic construct
  source 1..22: mol_type = other RNA
ccgtgggcccagggctatgcag

SEQ ID NO: 20865 - RNA, 22 nt, synthetic construct
  source 1..22: mol_type = other RNA
ccgtgtcagcccctggctgcag

SEQ ID NO: 20866 - RNA, 22 nt, synthetic construct
  source 1..22: mol_type = other RNA
ccgtgtccctggatctgttttc

SEQ ID NO: 20867 - RNA, 22 nt, synthetic construct
  source 1..22: mol_type = other RNA
ccgtgtctaacaggtaccatgt

SEQ ID NO: 20868 - RNA, 22 nt, synthetic construct
  source 1..22: mol_type = other RNA
ccgtgtggaaaactccctttgt

SEQ ID NO: 20869 - RNA, 22 nt, synthetic construct
  source 1..22: mol_type = other RNA
ccgttcacttcctgtttgcaga

SEQ ID NO: 20870 - RNA, 22 nt, synthetic construct
  source 1..22: mol_type = other RNA
ccgttcccagggcacgtgcggc

SEQ ID NO: 20871 - RNA, 22 nt, synthetic construct
  source 1..22: mol_type = other RNA
ccgttcccctgcatcccccttc

SEQ ID NO: 20872 - RNA, 22 nt, synthetic construct
  source 1..22: mol_type = other RNA
ccgttcccctgcatccccgttc

SEQ ID NO: 20873 - RNA, 22 nt, synthetic construct
  source 1..22: mol_type = other RNA
ccgtttctcattcttcccttag

SEQ ID NO: 20874 - RNA, 22 nt, synthetic construct
  source 1..22: mol_type = other RNA
cctaagaacttgggaacagcca

SEQ ID NO: 20875 - RNA, 22 nt, synthetic construct
  source 1..22: mol_type = other RNA
cctaagaatcctggctccagcc

SEQ ID NO: 20876 - RNA, 22 nt, synthetic construct
  source 1..22: mol_type = other RNA
cctaagacccagaagtccaggc

SEQ ID NO: 20877 - RNA, 22 nt, synthetic construct
  source 1..22: mol_type = other RNA
cctaaggccctgctctgggctt

SEQ ID NO: 20878 - RNA, 22 nt, synthetic construct
  source 1..22: mol_type = other RNA
cctaagggaagaatgagaaacg

SEQ ID NO: 20879 - RNA, 22 nt, synthetic construct
  source 1..22: mol_type = other RNA
cctacaggggttcctggctctg

SEQ ID NO: 20880 - RNA, 22 nt, synthetic construct
  source 1..22: mol_type = other RNA
cctactctagcccccaaccccc

SEQ ID NO: 20881 - RNA, 22 nt, synthetic construct
  source 1..22: mol_type = other RNA
cctacttggcctggaccccacg

SEQ ID NO: 20882 - RNA, 22 nt, synthetic construct
  source 1..22: mol_type = other RNA
cctagatccacgggataaatta

SEQ ID NO: 20883 - RNA, 22 nt, synthetic construct
  source 1..22: mol_type = other RNA
cctagcaccgtgtccctggatc

SEQ ID NO: 20884 - RNA, 22 nt, synthetic construct
  source 1..22: mol_type = other RNA
cctagccactaaggcaattggg

SEQ ID NO: 20885 - RNA, 22 nt, synthetic construct
  source 1..22: mol_type = other RNA
cctaggaaaacagggatggttg

SEQ ID NO: 20886 - RNA, 22 nt, synthetic construct
  source 1..22: mol_type = other RNA
cctaggacgcaccattctcaca

SEQ ID NO: 20887 - RNA, 22 nt, synthetic construct
  source 1..22: mol_type = other RNA
cctaggactgagggtttcagtg

SEQ ID NO: 20888 - RNA, 22 nt, synthetic construct
  source 1..22: mol_type = other RNA
cctaggtgttcaccaggtcgtg

SEQ ID NO: 20889 - RNA, 22 nt, synthetic construct
  source 1..22: mol_type = other RNA
cctagtctgagcactggaagcg

SEQ ID NO: 20890 - RNA, 22 nt, synthetic construct
  source 1..22: mol_type = other RNA
cctagttttagcactgaaaccc

SEQ ID NO: 20891 - RNA, 22 nt, synthetic construct
  source 1..22: mol_type = other RNA
cctatcgccatgacaactgggt

SEQ ID NO: 20892 - RNA, 22 nt, synthetic construct
  source 1..22: mol_type = other RNA
cctcaccaagtggttgataaac

SEQ ID NO: 20893 - RNA, 22 nt, synthetic construct
  source 1..22: mol_type = other RNA
cctcaccacagccctgccagga

SEQ ID NO: 20894 - RNA, 22 nt, synthetic construct
  source 1..22: mol_type = other RNA
cctcacctctccaaagctgccc

SEQ ID NO: 20895 - RNA, 22 nt, synthetic construct
  source 1..22: mol_type = other RNA
cctcagacccacgagtccaggc

SEQ ID NO: 20896 - RNA, 22 nt, synthetic construct
  source 1..22: mol_type = other RNA
cctcagatgaaggagtccaggc

SEQ ID NO: 20897 - RNA, 22 nt, synthetic construct
  source 1..22: mol_type = other RNA
cctcagctccagttcaggtccc

SEQ ID NO: 20898 - RNA, 22 nt, synthetic construct
  source 1..22: mol_type = other RNA
cctcaggcatctttcacaggga

SEQ ID NO: 20899 - RNA, 22 nt, synthetic construct
  source 1..22: mol_type = other RNA
cctcagtcctaggaaaacaggg

SEQ ID NO: 20900 - RNA, 22 nt, synthetic construct
  source 1..22: mol_type = other RNA
cctcagtgaactggagtgtgac

SEQ ID NO: 20901 - RNA, 22 nt, synthetic construct
  source 1..22: mol_type = other RNA
cctcatgctcttggccctcgta

SEQ ID NO: 20902 - RNA, 22 nt, synthetic construct
  source 1..22: mol_type = other RNA
cctccaactgtggggtgactgc

SEQ ID NO: 20903 - RNA, 22 nt, synthetic construct
  source 1..22: mol_type = other RNA
cctccaccctgcatagccctgg

SEQ ID NO: 20904 - RNA, 22 nt, synthetic construct
  source 1..22: mol_type = other RNA
cctccagatgggcagctttgga

SEQ ID NO: 20905 - RNA, 22 nt, synthetic construct
  source 1..22: mol_type = other RNA
cctccccattcaacccaggagg

SEQ ID NO: 20906 - RNA, 22 nt, synthetic construct
  source 1..22: mol_type = other RNA
cctcccctatcgccatgacaac

SEQ ID NO: 20907 - RNA, 22 nt, synthetic construct
  source 1..22: mol_type = other RNA
cctcccgcctcctccagatggg

SEQ ID NO: 20908 - RNA, 22 nt, synthetic construct
  source 1..22: mol_type = other RNA
cctccctaagacccagaagtcc

SEQ ID NO: 20909 - RNA, 22 nt, synthetic construct
  source 1..22: mol_type = other RNA
cctccctcggacccaggagtcc

SEQ ID NO: 20910 - RNA, 22 nt, synthetic construct
  source 1..22: mol_type = other RNA
cctcccttccccgttcacttcc

SEQ ID NO: 20911 - RNA, 22 nt, synthetic construct
  source 1..22: mol_type = other RNA
cctccgaccccctggacttcgg

SEQ ID NO: 20912 - RNA, 22 nt, synthetic construct
  source 1..22: mol_type = other RNA
cctccgcccagagcagggtccc

SEQ ID NO: 20913 - RNA, 22 nt, synthetic construct
  source 1..22: mol_type = other RNA
cctccgtgcgtcagttttacct

SEQ ID NO: 20914 - RNA, 22 nt, synthetic construct
  source 1..22: mol_type = other RNA
cctcctactctagcccccaacc

SEQ ID NO: 20915 - RNA, 22 nt, synthetic construct
  source 1..22: mol_type = other RNA
cctcctcaccacagccctgcca

SEQ ID NO: 20916 - RNA, 22 nt, synthetic construct
  source 1..22: mol_type = other RNA
cctcctccagatgggcagcttt

SEQ ID NO: 20917 - RNA, 22 nt, synthetic construct
  source 1..22: mol_type = other RNA
cctcctccgaccccctggactt

SEQ ID NO: 20918 - RNA, 22 nt, synthetic construct
  source 1..22: mol_type = other RNA
cctcctccttcagagccaggag

SEQ ID NO: 20919 - RNA, 22 nt, synthetic construct
  source 1..22: mol_type = other RNA
cctcctctctcaaacccaggag

SEQ ID NO: 20920 - RNA, 22 nt, synthetic construct
  source 1..22: mol_type = other RNA
cctcctctctgaaccccagccc

SEQ ID NO: 20921 - RNA, 22 nt, synthetic construct
  source 1..22: mol_type = other RNA
cctcctgccttaaacccagcca

SEQ ID NO: 20922 - RNA, 22 nt, synthetic construct
  source 1..22: mol_type = other RNA
cctcctgggataccccgaagag

SEQ ID NO: 20923 - RNA, 22 nt, synthetic construct
  source 1..22: mol_type = other RNA
cctcctgggttgaatggggagg

SEQ ID NO: 20924 - RNA, 22 nt, synthetic construct
  source 1..22: mol_type = other RNA
cctccttcagagccaggagtcc

SEQ ID NO: 20925 - RNA, 22 nt, synthetic construct
  source 1..22: mol_type = other RNA
cctcggacccaggagtccaggc

SEQ ID NO: 20926 - RNA, 22 nt, synthetic construct
  source 1..22: mol_type = other RNA
cctcgtagctccctcccgcctc

SEQ ID NO: 20927 - RNA, 22 nt, synthetic construct
  source 1..22: mol_type = other RNA
cctcgtccaccatctcatgccc

SEQ ID NO: 20928 - RNA, 22 nt, synthetic construct
  source 1..22: mol_type = other RNA
cctctactccctttctctttct

SEQ ID NO: 20929 - RNA, 22 nt, synthetic construct
  source 1..22: mol_type = other RNA
cctctccaaagctgcccatctg

SEQ ID NO: 20930 - RNA, 22 nt, synthetic construct
  source 1..22: mol_type = other RNA
cctctcccagaacctgagctgc

SEQ ID NO: 20931 - RNA, 22 nt, synthetic construct
  source 1..22: mol_type = other RNA
cctctccccattcagacccagg

SEQ ID NO: 20932 - RNA, 22 nt, synthetic construct
  source 1..22: mol_type = other RNA
cctctcctgggcttgccaagga

SEQ ID NO: 20933 - RNA, 22 nt, synthetic construct
  source 1..22: mol_type = other RNA
cctctcgtggggtccaggccaa

SEQ ID NO: 20934 - RNA, 22 nt, synthetic construct
  source 1..22: mol_type = other RNA
cctctctcaaacccaggagccc

SEQ ID NO: 20935 - RNA, 22 nt, synthetic construct
  source 1..22: mol_type = other RNA
cctctctgaaccccagcccacc

SEQ ID NO: 20936 - RNA, 22 nt, synthetic construct
  source 1..22: mol_type = other RNA
cctctgcacggggccctgcagc

SEQ ID NO: 20937 - RNA, 22 nt, synthetic construct
  source 1..22: mol_type = other RNA
cctctggagtcccgacttgctg

SEQ ID NO: 20938 - RNA, 22 nt, synthetic construct
  source 1..22: mol_type = other RNA
cctctggccactggctgtttaa

SEQ ID NO: 20939 - RNA, 22 nt, synthetic construct
  source 1..22: mol_type = other RNA
cctctgggagtcccgcccaggc

SEQ ID NO: 20940 - RNA, 22 nt, synthetic construct
  source 1..22: mol_type = other RNA
cctctgggggatgcaggggaag

SEQ ID NO: 20941 - RNA, 22 nt, synthetic construct
  source 1..22: mol_type = other RNA
cctcttccctagtctgagcact

SEQ ID NO: 20942 - RNA, 22 nt, synthetic construct
  source 1..22: mol_type = other RNA
cctcttgggaagtgtaaggaag

SEQ ID NO: 20943 - RNA, 22 nt, synthetic construct
  source 1..22: mol_type = other RNA
cctgaactggagctgaggaagg

SEQ ID NO: 20944 - RNA, 22 nt, synthetic construct
  source 1..22: mol_type = other RNA
cctgaccactgggcaaccaggc

SEQ ID NO: 20945 - RNA, 22 nt, synthetic construct
  source 1..22: mol_type = other RNA
cctgacccaaacccagctcccc

SEQ ID NO: 20946 - RNA, 22 nt, synthetic construct
  source 1..22: mol_type = other RNA
cctgagaagggaatccctcctc

SEQ ID NO: 20947 - RNA, 22 nt, synthetic construct
  source 1..22: mol_type = other RNA
cctgagcgcctctcctgggctt

SEQ ID NO: 20948 - RNA, 22 nt, synthetic construct
  source 1..22: mol_type = other RNA
cctgagctgctctgacgcggcc

SEQ ID NO: 20949 - RNA, 22 nt, synthetic construct
  source 1..22: mol_type = other RNA
cctgaggcctgggcaccaggga

SEQ ID NO: 20950 - RNA, 22 nt, synthetic construct
  source 1..22: mol_type = other RNA
cctgagtctgtcccagcacagg

SEQ ID NO: 20951 - RNA, 22 nt, synthetic construct
  source 1..22: mol_type = other RNA
cctgagttctaactttggctct

SEQ ID NO: 20952 - RNA, 22 nt, synthetic construct
  source 1..22: mol_type = other RNA
cctgcaccccaattgccttagt

SEQ ID NO: 20953 - RNA, 22 nt, synthetic construct
  source 1..22: mol_type = other RNA
cctgcagagtatctgctggggt

SEQ ID NO: 20954 - RNA, 22 nt, synthetic construct
  source 1..22: mol_type = other RNA
cctgcagccaggggctgacacg

SEQ ID NO: 20955 - RNA, 22 nt, synthetic construct
  source 1..22: mol_type = other RNA
cctgcatagccctgggcccacg

SEQ ID NO: 20956 - RNA, 22 nt, synthetic construct
  source 1..22: mol_type = other RNA
cctgcatcccccagaggcccca

SEQ ID NO: 20957 - RNA, 22 nt, synthetic construct
  source 1..22: mol_type = other RNA
cctgcatcccccttcccctgca

SEQ ID NO: 20958 - RNA, 22 nt, synthetic construct
  source 1..22: mol_type = other RNA
cctgcatccccgttcccctgca

SEQ ID NO: 20959 - RNA, 22 nt, synthetic construct
  source 1..22: mol_type = other RNA
cctgcatccttctccaggcagg

SEQ ID NO: 20960 - RNA, 22 nt, synthetic construct
  source 1..22: mol_type = other RNA
cctgccaggacggggctggcta

SEQ ID NO: 20961 - RNA, 22 nt, synthetic construct
  source 1..22: mol_type = other RNA
cctgcccagtacaggcatccct

SEQ ID NO: 20962 - RNA, 22 nt, synthetic construct
  source 1..22: mol_type = other RNA
cctgcccccattcctgcacccc

SEQ ID NO: 20963 - RNA, 22 nt, synthetic construct
  source 1..22: mol_type = other RNA
cctgccccttccctacaggggt

SEQ ID NO: 20964 - RNA, 22 nt, synthetic construct
  source 1..22: mol_type = other RNA
cctgcccggttctcagtggcca

SEQ ID NO: 20965 - RNA, 22 nt, synthetic construct
  source 1..22: mol_type = other RNA
cctgcctggagaaggatgcagg

SEQ ID NO: 20966 - RNA, 22 nt, synthetic construct
  source 1..22: mol_type = other RNA
cctgccttaaacccagccaggt

SEQ ID NO: 20967 - RNA, 22 nt, synthetic construct
  source 1..22: mol_type = other RNA
cctgcgctaccctctcccagaa

SEQ ID NO: 20968 - RNA, 22 nt, synthetic construct
  source 1..22: mol_type = other RNA
cctgctctgggcggaggaatat

SEQ ID NO: 20969 - RNA, 22 nt, synthetic construct
  source 1..22: mol_type = other RNA
cctgctctgggcttctgggttt

SEQ ID NO: 20970 - RNA, 22 nt, synthetic construct
  source 1..22: mol_type = other RNA
cctgctgtggctgttcccaagt

SEQ ID NO: 20971 - RNA, 22 nt, synthetic construct
  source 1..22: mol_type = other RNA
cctgcttcttggccacgtaacc

SEQ ID NO: 20972 - RNA, 22 nt, synthetic construct
  source 1..22: mol_type = other RNA
cctggaccccacgagaggccac

SEQ ID NO: 20973 - RNA, 22 nt, synthetic construct
  source 1..22: mol_type = other RNA
cctggacccctgggtctgaatg

SEQ ID NO: 20974 - RNA, 22 nt, synthetic construct
  source 1..22: mol_type = other RNA
cctggactcctgggtctgaggg

SEQ ID NO: 20975 - RNA, 22 nt, synthetic construct
  source 1..22: mol_type = other RNA
cctggactccttcatctgaggg

SEQ ID NO: 20976 - RNA, 22 nt, synthetic construct
  source 1..22: mol_type = other RNA
cctggactctggagtccctggt

SEQ ID NO: 20977 - RNA, 22 nt, synthetic construct
  source 1..22: mol_type = other RNA
cctggacttcggcttttgtccc

SEQ ID NO: 20978 - RNA, 22 nt, synthetic construct
  source 1..22: mol_type = other RNA
cctggacttctgggtcttaggg

SEQ ID NO: 20979 - RNA, 22 nt, synthetic construct
  source 1..22: mol_type = other RNA
cctggagaaggatgcaggacga

SEQ ID NO: 20980 - RNA, 22 nt, synthetic construct
  source 1..22: mol_type = other RNA
cctggagcattggggtgggctg

SEQ ID NO: 20981 - RNA, 22 nt, synthetic construct
  source 1..22: mol_type = other RNA
cctggatctgttttcgtggctc

SEQ ID NO: 20982 - RNA, 22 nt, synthetic construct
  source 1..22: mol_type = other RNA
cctggcagggctgtggtgagga

SEQ ID NO: 20983 - RNA, 22 nt, synthetic construct
  source 1..22: mol_type = other RNA
cctggcccccagcccctcctgc

SEQ ID NO: 20984 - RNA, 22 nt, synthetic construct
  source 1..22: mol_type = other RNA
cctggccggcctgaccactggg

SEQ ID NO: 20985 - RNA, 22 nt, synthetic construct
  source 1..22: mol_type = other RNA
cctggcctcctgggttgaatgg

SEQ ID NO: 20986 - RNA, 22 nt, synthetic construct
  source 1..22: mol_type = other RNA
cctggctatctgcaaacaggaa

SEQ ID NO: 20987 - RNA, 22 nt, synthetic construct
  source 1..22: mol_type = other RNA
cctggctccagcccctcctact

SEQ ID NO: 20988 - RNA, 22 nt, synthetic construct
  source 1..22: mol_type = other RNA
cctggctctcctgccccttccc

SEQ ID NO: 20989 - RNA, 22 nt, synthetic construct
  source 1..22: mol_type = other RNA
cctggctctgaaggaggagggg

SEQ ID NO: 20990 - RNA, 22 nt, synthetic construct
  source 1..22: mol_type = other RNA
cctggctctgctcttcagactg

SEQ ID NO: 20991 - RNA, 22 nt, synthetic construct
  source 1..22: mol_type = other RNA
cctggctgcagggccccgtgca

SEQ ID NO: 20992 - RNA, 22 nt, synthetic construct
  source 1..22: mol_type = other RNA
cctggctgggtttaaggcagga

SEQ ID NO: 20993 - RNA, 22 nt, synthetic construct
  source 1..22: mol_type = other RNA
cctgggaacgggatgaactcgg

SEQ ID NO: 20994 - RNA, 22 nt, synthetic construct
  source 1..22: mol_type = other RNA
cctgggataccccgaagagtga

SEQ ID NO: 20995 - RNA, 22 nt, synthetic construct
  source 1..22: mol_type = other RNA
cctgggcaaacagcataagctg

SEQ ID NO: 20996 - RNA, 22 nt, synthetic construct
  source 1..22: mol_type = other RNA
cctgggcaccagggactccaga

SEQ ID NO: 20997 - RNA, 22 nt, synthetic construct
  source 1..22: mol_type = other RNA
cctgggcccacggcttcgttcc

SEQ ID NO: 20998 - RNA, 22 nt, synthetic construct
  source 1..22: mol_type = other RNA
cctgggccccaggctgtcacac

SEQ ID NO: 20999 - RNA, 22 nt, synthetic construct
  source 1..22: mol_type = other RNA
cctgggcgggactcccagaggg

SEQ ID NO: 21000 - RNA, 22 nt, synthetic construct
  source 1..22: mol_type = other RNA
cctgggctcctgggtttgagag

SEQ ID NO: 21001 - RNA, 22 nt, synthetic construct
  source 1..22: mol_type = other RNA
cctgggcttgccaaggactcaa

SEQ ID NO: 21002 - RNA, 22 nt, synthetic construct
  source 1..22: mol_type = other RNA
cctggggcaagtccctcctccg

SEQ ID NO: 21003 - RNA, 22 nt, synthetic construct
  source 1..22: mol_type = other RNA
cctggggcccaggcacacaggt

SEQ ID NO: 21004 - RNA, 22 nt, synthetic construct
  source 1..22: mol_type = other RNA
cctggggcctctgggggatgca

SEQ ID NO: 21005 - RNA, 22 nt, synthetic construct
  source 1..22: mol_type = other RNA
cctggggctgtgtttctcgtcc

SEQ ID NO: 21006 - RNA, 22 nt, synthetic construct
  source 1..22: mol_type = other RNA
cctgggtctgaatggggagagg

SEQ ID NO: 21007 - RNA, 22 nt, synthetic construct
  source 1..22: mol_type = other RNA
cctgggtctgagggtggaggga

SEQ ID NO: 21008 - RNA, 22 nt, synthetic construct
  source 1..22: mol_type = other RNA
cctgggttgaatggggaggggt

SEQ ID NO: 21009 - RNA, 22 nt, synthetic construct
  source 1..22: mol_type = other RNA
cctgggtttgagagaggagggg

SEQ ID NO: 21010 - RNA, 22 nt, synthetic construct
  source 1..22: mol_type = other RNA
cctggtagacagggctggggtg

SEQ ID NO: 21011 - RNA, 22 nt, synthetic construct
  source 1..22: mol_type = other RNA
cctggtgaacacctaggacgca

SEQ ID NO: 21012 - RNA, 22 nt, synthetic construct
  source 1..22: mol_type = other RNA
cctggtgcccaggcctcaggca

SEQ ID NO: 21013 - RNA, 22 nt, synthetic construct
  source 1..22: mol_type = other RNA
cctggtgctgcagcttccttac

SEQ ID NO: 21014 - RNA, 22 nt, synthetic construct
  source 1..22: mol_type = other RNA
cctggttgcccagtggtcaggc

SEQ ID NO: 21015 - RNA, 22 nt, synthetic construct
  source 1..22: mol_type = other RNA
cctgtactgggcaggtccttga

SEQ ID NO: 21016 - RNA, 22 nt, synthetic construct
  source 1..22: mol_type = other RNA
cctgtagggaaggggcaggaga

SEQ ID NO: 21017 - RNA, 22 nt, synthetic construct
  source 1..22: mol_type = other RNA
cctgtcccccttcctcgtccac

SEQ ID NO: 21018 - RNA, 22 nt, synthetic construct
  source 1..22: mol_type = other RNA
cctgtctaccaggctgcctttt

SEQ ID NO: 21019 - RNA, 22 nt, synthetic construct
  source 1..22: mol_type = other RNA
cctgtgaaagatgcctgaggcc

SEQ ID NO: 21020 - RNA, 22 nt, synthetic construct
  source 1..22: mol_type = other RNA
cctgtgagataaggccagtagc

SEQ ID NO: 21021 - RNA, 22 nt, synthetic construct
  source 1..22: mol_type = other RNA
cctgtgctgggacagactcagg

SEQ ID NO: 21022 - RNA, 22 nt, synthetic construct
  source 1..22: mol_type = other RNA
cctgtgggtggtgacgggggtt

SEQ ID NO: 21023 - RNA, 22 nt, synthetic construct
  source 1..22: mol_type = other RNA
cctgtgtgcctgggccccaggc

SEQ ID NO: 21024 - RNA, 22 nt, synthetic construct
  source 1..22: mol_type = other RNA
cctgttagacacggcaaaaccc

SEQ ID NO: 21025 - RNA, 22 nt, synthetic construct
  source 1..22: mol_type = other RNA
cctgtttgcagatagccaggag

SEQ ID NO: 21026 - RNA, 22 nt, synthetic construct
  source 1..22: mol_type = other RNA
cctgttttcctaggactgaggg

SEQ ID NO: 21027 - RNA, 22 nt, synthetic construct
  source 1..22: mol_type = other RNA
ccttaaacccagccaggtcctt

SEQ ID NO: 21028 - RNA, 22 nt, synthetic construct
  source 1..22: mol_type = other RNA
ccttaaagagtccccagtgcta

SEQ ID NO: 21029 - RNA, 22 nt, synthetic construct
  source 1..22: mol_type = other RNA
ccttacacttcccaagaggaga

SEQ ID NO: 21030 - RNA, 22 nt, synthetic construct
  source 1..22: mol_type = other RNA
ccttagggaagcgggaccctgc

SEQ ID NO: 21031 - RNA, 22 nt, synthetic construct
  source 1..22: mol_type = other RNA
ccttaggggtccaaaacttggg

SEQ ID NO: 21032 - RNA, 22 nt, synthetic construct
  source 1..22: mol_type = other RNA
ccttagtggctagggggttggg

SEQ ID NO: 21033 - RNA, 22 nt, synthetic construct
  source 1..22: mol_type = other RNA
ccttatctcacaggtaaaactg

SEQ ID NO: 21034 - RNA, 22 nt, synthetic construct
  source 1..22: mol_type = other RNA
ccttcacagcccgagtttccat

SEQ ID NO: 21035 - RNA, 22 nt, synthetic construct
  source 1..22: mol_type = other RNA
ccttcagagccaggagtcctgg

SEQ ID NO: 21036 - RNA, 22 nt, synthetic construct
  source 1..22: mol_type = other RNA
ccttcagtgctcagtggaaacc

SEQ ID NO: 21037 - RNA, 22 nt, synthetic construct
  source 1..22: mol_type = other RNA
ccttcatctgagggcggaaggg

SEQ ID NO: 21038 - RNA, 22 nt, synthetic construct
  source 1..22: mol_type = other RNA
ccttccaagggtcaagctcgga

SEQ ID NO: 21039 - RNA, 22 nt, synthetic construct
  source 1..22: mol_type = other RNA
ccttccccgttcacttcctgtt

SEQ ID NO: 21040 - RNA, 22 nt, synthetic construct
  source 1..22: mol_type = other RNA
ccttcccctgcatcccccagag

SEQ ID NO: 21041 - RNA, 22 nt, synthetic construct
  source 1..22: mol_type = other RNA
ccttccctacaggggttcctgg

SEQ ID NO: 21042 - RNA, 22 nt, synthetic construct
  source 1..22: mol_type = other RNA
ccttccgccctcagatgaagga

SEQ ID NO: 21043 - RNA, 22 nt, synthetic construct
  source 1..22: mol_type = other RNA
ccttcctcagctccagttcagg

SEQ ID NO: 21044 - RNA, 22 nt, synthetic construct
  source 1..22: mol_type = other RNA
ccttcctccaccctgcatagcc

SEQ ID NO: 21045 - RNA, 22 nt, synthetic construct
  source 1..22: mol_type = other RNA
ccttcctcgtccaccatctcat

SEQ ID NO: 21046 - RNA, 22 nt, synthetic construct
  source 1..22: mol_type = other RNA
ccttctcaggttacgtggccaa

SEQ ID NO: 21047 - RNA, 22 nt, synthetic construct
  source 1..22: mol_type = other RNA
ccttctccaggcaggtccccaa

SEQ ID NO: 21048 - RNA, 22 nt, synthetic construct
  source 1..22: mol_type = other RNA
ccttctttccttaaagagtccc

SEQ ID NO: 21049 - RNA, 22 nt, synthetic construct
  source 1..22: mol_type = other RNA
ccttgaaagggaaaggcccatt

SEQ ID NO: 21050 - RNA, 22 nt, synthetic construct
  source 1..22: mol_type = other RNA
ccttgcccccctcccctatcgc

SEQ ID NO: 21051 - RNA, 22 nt, synthetic construct
  source 1..22: mol_type = other RNA
ccttggaaggacctggctgggt

SEQ ID NO: 21052 - RNA, 22 nt, synthetic construct
  source 1..22: mol_type = other RNA
ccttggcaagcccaggagaggc

SEQ ID NO: 21053 - RNA, 22 nt, synthetic construct
  source 1..22: mol_type = other RNA
ccttgtggacactgggtgggct

SEQ ID NO: 21054 - RNA, 22 nt, synthetic construct
  source 1..22: mol_type = other RNA
cctttcaaggacctgcccagta

SEQ ID NO: 21055 - RNA, 22 nt, synthetic construct
  source 1..22: mol_type = other RNA
cctttccctttcaaggacctgc

SEQ ID NO: 21056 - RNA, 22 nt, synthetic construct
  source 1..22: mol_type = other RNA
cctttcgtggtttccactgagc

SEQ ID NO: 21057 - RNA, 22 nt, synthetic construct
  source 1..22: mol_type = other RNA
cctttctagtccccaatttata

SEQ ID NO: 21058 - RNA, 22 nt, synthetic construct
  source 1..22: mol_type = other RNA
cctttctctttctccatccttc

SEQ ID NO: 21059 - RNA, 22 nt, synthetic construct
  source 1..22: mol_type = other RNA
cctttgtgagaatggtgcgtcc

SEQ ID NO: 21060 - RNA, 22 nt, synthetic construct
  source 1..22: mol_type = other RNA
ccttttgggtggattctcctcc

SEQ ID NO: 21061 - RNA, 22 nt, synthetic construct
  source 1..22: mol_type = other RNA
cgaaaacagatccagggacacg

SEQ ID NO: 21062 - RNA, 22 nt, synthetic construct
  source 1..22: mol_type = other RNA
cgaaaggactcctggctatctg

SEQ ID NO: 21063 - RNA, 22 nt, synthetic construct
  source 1..22: mol_type = other RNA
cgaagagtgagtttgccaagca

SEQ ID NO: 21064 - RNA, 22 nt, synthetic construct
  source 1..22: mol_type = other RNA
cgaagccgtgggcccagggcta

SEQ ID NO: 21065 - RNA, 22 nt, synthetic construct
  source 1..22: mol_type = other RNA
cgaagtccagggggtcggagga

SEQ ID NO: 21066 - RNA, 22 nt, synthetic construct
  source 1..22: mol_type = other RNA
cgaccccctggacttcggcttt

SEQ ID NO: 21067 - RNA, 22 nt, synthetic construct
  source 1..22: mol_type = other RNA
cgacctggtgaacacctaggac

SEQ ID NO: 21068 - RNA, 22 nt, synthetic construct
  source 1..22: mol_type = other RNA
cgagaaacacagccccaggtgg

SEQ ID NO: 21069 - RNA, 22 nt, synthetic construct
  source 1..22: mol_type = other RNA
cgagaggccaccccagccctgt

SEQ ID NO: 21070 - RNA, 22 nt, synthetic construct
  source 1..22: mol_type = other RNA
cgagccgagttcatcccgttcc

SEQ ID NO: 21071 - RNA, 22 nt, synthetic construct
  source 1..22: mol_type = other RNA
cgagcttgacccttggaaggac

SEQ ID NO: 21072 - RNA, 22 nt, synthetic construct
  source 1..22: mol_type = other RNA
cgaggaagggggacagggaagc

SEQ ID NO: 21073 - RNA, 22 nt, synthetic construct
  source 1..22: mol_type = other RNA
cgagggaggaggggctggggcc

SEQ ID NO: 21074 - RNA, 22 nt, synthetic construct
  source 1..22: mol_type = other RNA
cgagggccaagagcatgaggtc

SEQ ID NO: 21075 - RNA, 22 nt, synthetic construct
  source 1..22: mol_type = other RNA
cgagtccaggccccagcccctc

SEQ ID NO: 21076 - RNA, 22 nt, synthetic construct
  source 1..22: mol_type = other RNA
cgagttcatcccgttcccaggg

SEQ ID NO: 21077 - RNA, 22 nt, synthetic construct
  source 1..22: mol_type = other RNA
cgagtttccatgacctcatgct

SEQ ID NO: 21078 - RNA, 22 nt, synthetic construct
  source 1..22: mol_type = other RNA
cgataggggaggggggcaagga

SEQ ID NO: 21079 - RNA, 22 nt, synthetic construct
  source 1..22: mol_type = other RNA
cgatgcttggggacctgcctgg

SEQ ID NO: 21080 - RNA, 22 nt, synthetic construct
  source 1..22: mol_type = other RNA
cgcaccagacggccgcgtcaga

SEQ ID NO: 21081 - RNA, 22 nt, synthetic construct
  source 1..22: mol_type = other RNA
cgcaccattctcacaaagggag

SEQ ID NO: 21082 - RNA, 22 nt, synthetic construct
  source 1..22: mol_type = other RNA
cgcacccagatgagaagccccc

SEQ ID NO: 21083 - RNA, 22 nt, synthetic construct
  source 1..22: mol_type = other RNA
cgcacggaggaacaatataaat

SEQ ID NO: 21084 - RNA, 22 nt, synthetic construct
  source 1..22: mol_type = other RNA
cgcacgtgccctgggaacggga

SEQ ID NO: 21085 - RNA, 22 nt, synthetic construct
  source 1..22: mol_type = other RNA
cgcagggtggccactgagaacc

SEQ ID NO: 21086 - RNA, 22 nt, synthetic construct
  source 1..22: mol_type = other RNA
cgccacctgtgggtggtgacgg

SEQ ID NO: 21087 - RNA, 22 nt, synthetic construct
  source 1..22: mol_type = other RNA
cgccatgacaactgggtggaaa

SEQ ID NO: 21088 - RNA, 22 nt, synthetic construct
  source 1..22: mol_type = other RNA
cgcccagagcagggtcccgctt

SEQ ID NO: 21089 - RNA, 22 nt, synthetic construct
  source 1..22: mol_type = other RNA
cgcccaggcccctgagtctgtc

SEQ ID NO: 21090 - RNA, 22 nt, synthetic construct
  source 1..22: mol_type = other RNA
cgcccccctgctgtggctgttc

SEQ ID NO: 21091 - RNA, 22 nt, synthetic construct
  source 1..22: mol_type = other RNA
cgccctcagatgaaggagtcca

SEQ ID NO: 21092 - RNA, 22 nt, synthetic construct
  source 1..22: mol_type = other RNA
cgcctccctaagacccagaagt

SEQ ID NO: 21093 - RNA, 22 nt, synthetic construct
  source 1..22: mol_type = other RNA
cgcctcctccagatgggcagct

SEQ ID NO: 21094 - RNA, 22 nt, synthetic construct
  source 1..22: mol_type = other RNA
cgcctctactccctttctcttt

SEQ ID NO: 21095 - RNA, 22 nt, synthetic construct
  source 1..22: mol_type = other RNA
cgcctctcctgggcttgccaag

SEQ ID NO: 21096 - RNA, 22 nt, synthetic construct
  source 1..22: mol_type = other RNA
cgcctggttgcccagtggtcag

SEQ ID NO: 21097 - RNA, 22 nt, synthetic construct
  source 1..22: mol_type = other RNA
cgcggccgtctggtgcgtttca

SEQ ID NO: 21098 - RNA, 22 nt, synthetic construct
  source 1..22: mol_type = other RNA
cgcgtcagagcagctcaggttc

SEQ ID NO: 21099 - RNA, 22 nt, synthetic construct
  source 1..22: mol_type = other RNA
cgctaccctctcccagaacctg

SEQ ID NO: 21100 - RNA, 22 nt, synthetic construct
  source 1..22: mol_type = other RNA
cgctcaggcttccctgtccccc

SEQ ID NO: 21101 - RNA, 22 nt, synthetic construct
  source 1..22: mol_type = other RNA
cgcttccagtgctcagactagg

SEQ ID NO: 21102 - RNA, 22 nt, synthetic construct
  source 1..22: mol_type = other RNA
cgcttccctaaggccctgctct

SEQ ID NO: 21103 - RNA, 22 nt, synthetic construct
  source 1..22: mol_type = other RNA
cggaaaccaccccagcagatac

SEQ ID NO: 21104 - RNA, 22 nt, synthetic construct
  source 1..22: mol_type = other RNA
cggaagggctggggcctggcct

SEQ ID NO: 21105 - RNA, 22 nt, synthetic construct
  source 1..22: mol_type = other RNA
cggacacccccctcctcaccac

SEQ ID NO: 21106 - RNA, 22 nt, synthetic construct
  source 1..22: mol_type = other RNA
cggacccaggagtccaggcccc

SEQ ID NO: 21107 - RNA, 22 nt, synthetic construct
  source 1..22: mol_type = other RNA
cggagcccacccagtgtccaca

SEQ ID NO: 21108 - RNA, 22 nt, synthetic construct
  source 1..22: mol_type = other RNA
cggaggaacaatataaattggg

SEQ ID NO: 21109 - RNA, 22 nt, synthetic construct
  source 1..22: mol_type = other RNA
cggaggaatatgtcccagatag

SEQ ID NO: 21110 - RNA, 22 nt, synthetic construct
  source 1..22: mol_type = other RNA
cggaggagggacttgccccagg

SEQ ID NO: 21111 - RNA, 22 nt, synthetic construct
  source 1..22: mol_type = other RNA
cggcaaaacccccgtcaccacc

SEQ ID NO: 21112 - RNA, 22 nt, synthetic construct
  source 1..22: mol_type = other RNA
cggccacgacctggtgaacacc

SEQ ID NO: 21113 - RNA, 22 nt, synthetic construct
  source 1..22: mol_type = other RNA
cggccaggccttcagtgctcag

SEQ ID NO: 21114 - RNA, 22 nt, synthetic construct
  source 1..22: mol_type = other RNA
cggccagtttctccacctgggg

SEQ ID NO: 21115 - RNA, 22 nt, synthetic construct
  source 1..22: mol_type = other RNA
cggccccttcacagcccgagtt

SEQ ID NO: 21116 - RNA, 22 nt, synthetic construct
  source 1..22: mol_type = other RNA
cggccgcgtcagagcagctcag

SEQ ID NO: 21117 - RNA, 22 nt, synthetic construct
  source 1..22: mol_type = other RNA
cggccgtctggtgcgtttcact

SEQ ID NO: 21118 - RNA, 22 nt, synthetic construct
  source 1..22: mol_type = other RNA
cggcctgaccactgggcaacca

SEQ ID NO: 21119 - RNA, 22 nt, synthetic construct
  source 1..22: mol_type = other RNA
cggctcgtttatttccacccag

SEQ ID NO: 21120 - RNA, 22 nt, synthetic construct
  source 1..22: mol_type = other RNA
cggcttcgttcctgcagagtat

SEQ ID NO: 21121 - RNA, 22 nt, synthetic construct
  source 1..22: mol_type = other RNA
cggcttttgtccccccaagttt

SEQ ID NO: 21122 - RNA, 22 nt, synthetic construct
  source 1..22: mol_type = other RNA
cgggaaccccacatggtacctg

SEQ ID NO: 21123 - RNA, 22 nt, synthetic construct
  source 1..22: mol_type = other RNA
cgggaatcaagagtcacccaga

SEQ ID NO: 21124 - RNA, 22 nt, synthetic construct
  source 1..22: mol_type = other RNA
cgggaccctgctctgggcggag

SEQ ID NO: 21125 - RNA, 22 nt, synthetic construct
  source 1..22: mol_type = other RNA
cgggacctgaactggagctgag

SEQ ID NO: 21126 - RNA, 22 nt, synthetic construct
  source 1..22: mol_type = other RNA
cgggactccagagggagccacg

SEQ ID NO: 21127 - RNA, 22 nt, synthetic construct
  source 1..22: mol_type = other RNA
cgggactcccagaggggtgaga

SEQ ID NO: 21128 - RNA, 22 nt, synthetic construct
  source 1..22: mol_type = other RNA
cgggagggagctacgagggcca

SEQ ID NO: 21129 - RNA, 22 nt, synthetic construct
  source 1..22: mol_type = other RNA
cgggataaattaccccccaagt

SEQ ID NO: 21130 - RNA, 22 nt, synthetic construct
  source 1..22: mol_type = other RNA
cgggatgaactcggctcgttta

SEQ ID NO: 21131 - RNA, 22 nt, synthetic construct
  source 1..22: mol_type = other RNA
cgggccaccgtttctcattctt

SEQ ID NO: 21132 - RNA, 22 nt, synthetic construct
  source 1..22: mol_type = other RNA
cgggctgtgaaggggccgcacg

SEQ ID NO: 21133 - RNA, 22 nt, synthetic construct
  source 1..22: mol_type = other RNA
cggggaagggagggggcttctc

SEQ ID NO: 21134 - RNA, 22 nt, synthetic construct
  source 1..22: mol_type = other RNA
cggggatgcaggggaacggggc

SEQ ID NO: 21135 - RNA, 22 nt, synthetic construct
  source 1..22: mol_type = other RNA
cggggccctgcagccaggggct

SEQ ID NO: 21136 - RNA, 22 nt, synthetic construct
  source 1..22: mol_type = other RNA
cggggctcagtctgaagagcag

SEQ ID NO: 21137 - RNA, 22 nt, synthetic construct
  source 1..22: mol_type = other RNA
cggggctggctactggccttat

SEQ ID NO: 21138 - RNA, 22 nt, synthetic construct
  source 1..22: mol_type = other RNA
cggggctgggcctggacccctg

SEQ ID NO: 21139 - RNA, 22 nt, synthetic construct
  source 1..22: mol_type = other RNA
cgggggttttgccgtgtctaac

SEQ ID NO: 21140 - RNA, 22 nt, synthetic construct
  source 1..22: mol_type = other RNA
cggggtatcccaggaggcctgg

SEQ ID NO: 21141 - RNA, 22 nt, synthetic construct
  source 1..22: mol_type = other RNA
cggtgctaggacagtggggaaa

SEQ ID NO: 21142 - RNA, 22 nt, synthetic construct
  source 1..22: mol_type = other RNA
cggtggcccgtgtcagcccctg

SEQ ID NO: 21143 - RNA, 22 nt, synthetic construct
  source 1..22: mol_type = other RNA
cggtgtcccagcaagtcgggac

SEQ ID NO: 21144 - RNA, 22 nt, synthetic construct
  source 1..22: mol_type = other RNA
cggttctcagtggccaccctgc

SEQ ID NO: 21145 - RNA, 22 nt, synthetic construct
  source 1..22: mol_type = other RNA
cgtaacctgagaagggaatccc

SEQ ID NO: 21146 - RNA, 22 nt, synthetic construct
  source 1..22: mol_type = other RNA
cgtagctccctcccgcctcctc

SEQ ID NO: 21147 - RNA, 22 nt, synthetic construct
  source 1..22: mol_type = other RNA
cgtatcttaaacagccagtggc

SEQ ID NO: 21148 - RNA, 22 nt, synthetic construct
  source 1..22: mol_type = other RNA
cgtcaccacccacaggtggcgc

SEQ ID NO: 21149 - RNA, 22 nt, synthetic construct
  source 1..22: mol_type = other RNA
cgtcagagcagctcaggttctg

SEQ ID NO: 21150 - RNA, 22 nt, synthetic construct
  source 1..22: mol_type = other RNA
cgtcagttttacctgtgagata

SEQ ID NO: 21151 - RNA, 22 nt, synthetic construct
  source 1..22: mol_type = other RNA
cgtccaccatctcatgcccctg

SEQ ID NO: 21152 - RNA, 22 nt, synthetic construct
  source 1..22: mol_type = other RNA
cgtcctaggtgttcaccaggtc

SEQ ID NO: 21153 - RNA, 22 nt, synthetic construct
  source 1..22: mol_type = other RNA
cgtcctgcatccttctccaggc

SEQ ID NO: 21154 - RNA, 22 nt, synthetic construct
  source 1..22: mol_type = other RNA
cgtcctggcagggctgtggtga

SEQ ID NO: 21155 - RNA, 22 nt, synthetic construct
  source 1..22: mol_type = other RNA
cgtctggtgcgtttcactgatc

SEQ ID NO: 21156 - RNA, 22 nt, synthetic construct
  source 1..22: mol_type = other RNA
cgtgacctgcccggttctcagt

SEQ ID NO: 21157 - RNA, 22 nt, synthetic construct
  source 1..22: mol_type = other RNA
cgtgcagagggggcctcagtga

SEQ ID NO: 21158 - RNA, 22 nt, synthetic construct
  source 1..22: mol_type = other RNA
cgtgccctgggaacgggatgaa

SEQ ID NO: 21159 - RNA, 22 nt, synthetic construct
  source 1..22: mol_type = other RNA
cgtgcggccccttcacagcccg

SEQ ID NO: 21160 - RNA, 22 nt, synthetic construct
  source 1..22: mol_type = other RNA
cgtgcgtcagttttacctgtga

SEQ ID NO: 21161 - RNA, 22 nt, synthetic construct
  source 1..22: mol_type = other RNA
cgtggatctaggagtttagctt

SEQ ID NO: 21162 - RNA, 22 nt, synthetic construct
  source 1..22: mol_type = other RNA
cgtggccaagaagcaggggagc

SEQ ID NO: 21163 - RNA, 22 nt, synthetic construct
  source 1..22: mol_type = other RNA
cgtggccgcctctactcccttt

SEQ ID NO: 21164 - RNA, 22 nt, synthetic construct
  source 1..22: mol_type = other RNA
cgtggctccctctggagtcccg

SEQ ID NO: 21165 - RNA, 22 nt, synthetic construct
  source 1..22: mol_type = other RNA
cgtgggcccagggctatgcagg

SEQ ID NO: 21166 - RNA, 22 nt, synthetic construct
  source 1..22: mol_type = other RNA
cgtggggtaccctaagaacttg

SEQ ID NO: 21167 - RNA, 22 nt, synthetic construct
  source 1..22: mol_type = other RNA
cgtggggtccaggccaagtagg

SEQ ID NO: 21168 - RNA, 22 nt, synthetic construct
  source 1..22: mol_type = other RNA
cgtgggtctgagggaggagggg

SEQ ID NO: 21169 - RNA, 22 nt, synthetic construct
  source 1..22: mol_type = other RNA
cgtgggtttatcaaccacttgg

SEQ ID NO: 21170 - RNA, 22 nt, synthetic construct
  source 1..22: mol_type = other RNA
cgtggtttccactgagcactga

SEQ ID NO: 21171 - RNA, 22 nt, synthetic construct
  source 1..22: mol_type = other RNA
cgtgtcagcccctggctgcagg

SEQ ID NO: 21172 - RNA, 22 nt, synthetic construct
  source 1..22: mol_type = other RNA
cgtgtccctggatctgttttcg

SEQ ID NO: 21173 - RNA, 22 nt, synthetic construct
  source 1..22: mol_type = other RNA
cgtgtctaacaggtaccatgtg

SEQ ID NO: 21174 - RNA, 22 nt, synthetic construct
  source 1..22: mol_type = other RNA
cgtgtggaaaactccctttgtg

SEQ ID NO: 21175 - RNA, 22 nt, synthetic construct
  source 1..22: mol_type = other RNA
cgttcacttcctgtttgcagat

SEQ ID NO: 21176 - RNA, 22 nt, synthetic construct
  source 1..22: mol_type = other RNA
cgttcccagggcacgtgcggcc

SEQ ID NO: 21177 - RNA, 22 nt, synthetic construct
  source 1..22: mol_type = other RNA
cgttcccctgcatcccccttcc

SEQ ID NO: 21178 - RNA, 22 nt, synthetic construct
  source 1..22: mol_type = other RNA
cgttcccctgcatccccgttcc

SEQ ID NO: 21179 - RNA, 22 nt, synthetic construct
  source 1..22: mol_type = other RNA
cgttcctgcagagtatctgctg

SEQ ID NO: 21180 - RNA, 22 nt, synthetic construct
  source 1..22: mol_type = other RNA
cgtttatttccacccagttgtc

SEQ ID NO: 21181 - RNA, 22 nt, synthetic construct
  source 1..22: mol_type = other RNA
cgtttcactgatcctggtgctg

SEQ ID NO: 21182 - RNA, 22 nt, synthetic construct
  source 1..22: mol_type = other RNA
cgtttctcattcttcccttagg

SEQ ID NO: 21183 - RNA, 22 nt, synthetic construct
  source 1..22: mol_type = other RNA
ctaaaactaggctgtcctgggc

SEQ ID NO: 21184 - RNA, 22 nt, synthetic construct
  source 1..22: mol_type = other RNA
ctaaactcctagatccacggga

SEQ ID NO: 21185 - RNA, 22 nt, synthetic construct
  source 1..22: mol_type = other RNA
ctaacaggtaccatgtggggtt

SEQ ID NO: 21186 - RNA, 22 nt, synthetic construct
  source 1..22: mol_type = other RNA
ctaactttggctcttcaccttt

SEQ ID NO: 21187 - RNA, 22 nt, synthetic construct
  source 1..22: mol_type = other RNA
ctaagaacttgggaacagccac

SEQ ID NO: 21188 - RNA, 22 nt, synthetic construct
  source 1..22: mol_type = other RNA
ctaagaatcctggctccagccc

SEQ ID NO: 21189 - RNA, 22 nt, synthetic construct
  source 1..22: mol_type = other RNA
ctaagacccagaagtccaggcc

SEQ ID NO: 21190 - RNA, 22 nt, synthetic construct
  source 1..22: mol_type = other RNA
ctaaggcaattggggtgcagga

SEQ ID NO: 21191 - RNA, 22 nt, synthetic construct
  source 1..22: mol_type = other RNA
ctaaggccctgctctgggcttc

SEQ ID NO: 21192 - RNA, 22 nt, synthetic construct
  source 1..22: mol_type = other RNA
ctaagggaagaatgagaaacgg

SEQ ID NO: 21193 - RNA, 22 nt, synthetic construct
  source 1..22: mol_type = other RNA
ctacaggggttcctggctctgc

SEQ ID NO: 21194 - RNA, 22 nt, synthetic construct
  source 1..22: mol_type = other RNA
ctaccaggctgccttttgggtg

SEQ ID NO: 21195 - RNA, 22 nt, synthetic construct
  source 1..22: mol_type = other RNA
ctaccctctcccagaacctgag

SEQ ID NO: 21196 - RNA, 22 nt, synthetic construct
  source 1..22: mol_type = other RNA
ctacgagggccaagagcatgag

SEQ ID NO: 21197 - RNA, 22 nt, synthetic construct
  source 1..22: mol_type = other RNA
ctactccctttctctttctcca

SEQ ID NO: 21198 - RNA, 22 nt, synthetic construct
  source 1..22: mol_type = other RNA
ctactctagcccccaaccccct

SEQ ID NO: 21199 - RNA, 22 nt, synthetic construct
  source 1..22: mol_type = other RNA
ctactggccttatctcacaggt

SEQ ID NO: 21200 - RNA, 22 nt, synthetic construct
  source 1..22: mol_type = other RNA
ctacttggcctggaccccacga

SEQ ID NO: 21201 - RNA, 22 nt, synthetic construct
  source 1..22: mol_type = other RNA
ctagaaaggtgaagagccaaag

SEQ ID NO: 21202 - RNA, 22 nt, synthetic construct
  source 1..22: mol_type = other RNA
ctagagtaggaggggctggagc

SEQ ID NO: 21203 - RNA, 22 nt, synthetic construct
  source 1..22: mol_type = other RNA
ctagatccacgggataaattac

SEQ ID NO: 21204 - RNA, 22 nt, synthetic construct
  source 1..22: mol_type = other RNA
ctagcaccgtgtccctggatct

SEQ ID NO: 21205 - RNA, 22 nt, synthetic construct
  source 1..22: mol_type = other RNA
ctagccactaaggcaattgggg

SEQ ID NO: 21206 - RNA, 22 nt, synthetic construct
  source 1..22: mol_type = other RNA
ctagcccccaaccccctagcca

SEQ ID NO: 21207 - RNA, 22 nt, synthetic construct
  source 1..22: mol_type = other RNA
ctaggaaaacagggatggttgg

SEQ ID NO: 21208 - RNA, 22 nt, synthetic construct
  source 1..22: mol_type = other RNA
ctaggacagtggggaaaatgac

SEQ ID NO: 21209 - RNA, 22 nt, synthetic construct
  source 1..22: mol_type = other RNA
ctaggacgcaccattctcacaa

SEQ ID NO: 21210 - RNA, 22 nt, synthetic construct
  source 1..22: mol_type = other RNA
ctaggactgagggtttcagtgc

SEQ ID NO: 21211 - RNA, 22 nt, synthetic construct
  source 1..22: mol_type = other RNA
ctaggagtttagcttcactcct

SEQ ID NO: 21212 - RNA, 22 nt, synthetic construct
  source 1..22: mol_type = other RNA
ctaggctgtcctgggcaaacag

SEQ ID NO: 21213 - RNA, 22 nt, synthetic construct
  source 1..22: mol_type = other RNA
ctagggaagaggttccagcccc

SEQ ID NO: 21214 - RNA, 22 nt, synthetic construct
  source 1..22: mol_type = other RNA
ctagggggttgggggctagagt

SEQ ID NO: 21215 - RNA, 22 nt, synthetic construct
  source 1..22: mol_type = other RNA
ctaggtgttcaccaggtcgtgg

SEQ ID NO: 21216 - RNA, 22 nt, synthetic construct
  source 1..22: mol_type = other RNA
ctagtccccaatttatattgtt

SEQ ID NO: 21217 - RNA, 22 nt, synthetic construct
  source 1..22: mol_type = other RNA
ctagtctgagcactggaagcgc

SEQ ID NO: 21218 - RNA, 22 nt, synthetic construct
  source 1..22: mol_type = other RNA
ctagttttagcactgaaaccct

SEQ ID NO: 21219 - RNA, 22 nt, synthetic construct
  source 1..22: mol_type = other RNA
ctatcgccatgacaactgggtg

SEQ ID NO: 21220 - RNA, 22 nt, synthetic construct
  source 1..22: mol_type = other RNA
ctatctgcaaacaggaagtgaa

SEQ ID NO: 21221 - RNA, 22 nt, synthetic construct
  source 1..22: mol_type = other RNA
ctatctgggacatattcctccg

SEQ ID NO: 21222 - RNA, 22 nt, synthetic construct
  source 1..22: mol_type = other RNA
ctatgcagggtggaggaaggcc

SEQ ID NO: 21223 - RNA, 22 nt, synthetic construct
  source 1..22: mol_type = other RNA
ctcaaacccagaagcccagagc

SEQ ID NO: 21224 - RNA, 22 nt, synthetic construct
  source 1..22: mol_type = other RNA
ctcaaacccaggagcccaggcc

SEQ ID NO: 21225 - RNA, 22 nt, synthetic construct
  source 1..22: mol_type = other RNA
ctcacaaagggagttttccaca

SEQ ID NO: 21226 - RNA, 22 nt, synthetic construct
  source 1..22: mol_type = other RNA
ctcacaggtaaaactgacgcac

SEQ ID NO: 21227 - RNA, 22 nt, synthetic construct
  source 1..22: mol_type = other RNA
ctcaccaagtggttgataaacc

SEQ ID NO: 21228 - RNA, 22 nt, synthetic construct
  source 1..22: mol_type = other RNA
ctcaccacagccctgccaggac

SEQ ID NO: 21229 - RNA, 22 nt, synthetic construct
  source 1..22: mol_type = other RNA
ctcacccctctgggagtcccgc

SEQ ID NO: 21230 - RNA, 22 nt, synthetic construct
  source 1..22: mol_type = other RNA
ctcacctctccaaagctgccca

SEQ ID NO: 21231 - RNA, 22 nt, synthetic construct
  source 1..22: mol_type = other RNA
ctcactcttcggggtatcccag

SEQ ID NO: 21232 - RNA, 22 nt, synthetic construct
  source 1..22: mol_type = other RNA
ctcagacccacgagtccaggcc

SEQ ID NO: 21233 - RNA, 22 nt, synthetic construct
  source 1..22: mol_type = other RNA
ctcagactagggaagaggttcc

SEQ ID NO: 21234 - RNA, 22 nt, synthetic construct
  source 1..22: mol_type = other RNA
ctcagatgaaggagtccaggcc

SEQ ID NO: 21235 - RNA, 22 nt, synthetic construct
  source 1..22: mol_type = other RNA
ctcagctccagttcaggtcccg

SEQ ID NO: 21236 - RNA, 22 nt, synthetic construct
  source 1..22: mol_type = other RNA
ctcaggaccaacttattctgat

SEQ ID NO: 21237 - RNA, 22 nt, synthetic construct
  source 1..22: mol_type = other RNA
ctcaggcatctttcacagggat

SEQ ID NO: 21238 - RNA, 22 nt, synthetic construct
  source 1..22: mol_type = other RNA
ctcaggcttccctgtccccctt

SEQ ID NO: 21239 - RNA, 22 nt, synthetic construct
  source 1..22: mol_type = other RNA
ctcaggggcctgggcgggactc

SEQ ID NO: 21240 - RNA, 22 nt, synthetic construct
  source 1..22: mol_type = other RNA
ctcaggttacgtggccaagaag

SEQ ID NO: 21241 - RNA, 22 nt, synthetic construct
  source 1..22: mol_type = other RNA
ctcaggttctgggagagggtag

SEQ ID NO: 21242 - RNA, 22 nt, synthetic construct
  source 1..22: mol_type = other RNA
ctcagtcctaggaaaacaggga

SEQ ID NO: 21243 - RNA, 22 nt, synthetic construct
  source 1..22: mol_type = other RNA
ctcagtctgaagagcagagcca

SEQ ID NO: 21244 - RNA, 22 nt, synthetic construct
  source 1..22: mol_type = other RNA
ctcagtgaactggagtgtgaca

SEQ ID NO: 21245 - RNA, 22 nt, synthetic construct
  source 1..22: mol_type = other RNA
ctcagtggaaaccacgaaagga

SEQ ID NO: 21246 - RNA, 22 nt, synthetic construct
  source 1..22: mol_type = other RNA
ctcagtggccaccctgcgctac

SEQ ID NO: 21247 - RNA, 22 nt, synthetic construct
  source 1..22: mol_type = other RNA
ctcatctgggtgcgggaacccc

SEQ ID NO: 21248 - RNA, 22 nt, synthetic construct
  source 1..22: mol_type = other RNA
ctcatgcccctggctctcctgc

SEQ ID NO: 21249 - RNA, 22 nt, synthetic construct
  source 1..22: mol_type = other RNA
ctcatgctcttggccctcgtag

SEQ ID NO: 21250 - RNA, 22 nt, synthetic construct
  source 1..22: mol_type = other RNA
ctcattcttcccttaggggtcc

SEQ ID NO: 21251 - RNA, 22 nt, synthetic construct
  source 1..22: mol_type = other RNA
ctccaaagctgcccatctggag

SEQ ID NO: 21252 - RNA, 22 nt, synthetic construct
  source 1..22: mol_type = other RNA
ctccaactgtggggtgactgct

SEQ ID NO: 21253 - RNA, 22 nt, synthetic construct
  source 1..22: mol_type = other RNA
ctccaccctgcatagccctggg

SEQ ID NO: 21254 - RNA, 22 nt, synthetic construct
  source 1..22: mol_type = other RNA
ctccacctggggctgtgtttct

SEQ ID NO: 21255 - RNA, 22 nt, synthetic construct
  source 1..22: mol_type = other RNA
ctccagagggagccacgaaaac

SEQ ID NO: 21256 - RNA, 22 nt, synthetic construct
  source 1..22: mol_type = other RNA
ctccagagtccaggcccaaccc

SEQ ID NO: 21257 - RNA, 22 nt, synthetic construct
  source 1..22: mol_type = other RNA
ctccagatgggcagctttggag

SEQ ID NO: 21258 - RNA, 22 nt, synthetic construct
  source 1..22: mol_type = other RNA
ctccagcccctcctactctagc

SEQ ID NO: 21259 - RNA, 22 nt, synthetic construct
  source 1..22: mol_type = other RNA
ctccaggcaggtccccaagcat

SEQ ID NO: 21260 - RNA, 22 nt, synthetic construct
  source 1..22: mol_type = other RNA
ctccaggcctcctgggataccc

SEQ ID NO: 21261 - RNA, 22 nt, synthetic construct
  source 1..22: mol_type = other RNA
ctccagttcactgaggccccct

SEQ ID NO: 21262 - RNA, 22 nt, synthetic construct
  source 1..22: mol_type = other RNA
ctccagttcaggtcccggagcc

SEQ ID NO: 21263 - RNA, 22 nt, synthetic construct
  source 1..22: mol_type = other RNA
ctccatccttctttccttaaag

SEQ ID NO: 21264 - RNA, 22 nt, synthetic construct
  source 1..22: mol_type = other RNA
ctcccagaacctgagctgctct

SEQ ID NO: 21265 - RNA, 22 nt, synthetic construct
  source 1..22: mol_type = other RNA
ctcccagaggggtgagacagct

SEQ ID NO: 21266 - RNA, 22 nt, synthetic construct
  source 1..22: mol_type = other RNA
ctccccattcaacccaggaggc

SEQ ID NO: 21267 - RNA, 22 nt, synthetic construct
  source 1..22: mol_type = other RNA
ctccccattcagacccaggggt

SEQ ID NO: 21268 - RNA, 22 nt, synthetic construct
  source 1..22: mol_type = other RNA
ctcccctatcgccatgacaact

SEQ ID NO: 21269 - RNA, 22 nt, synthetic construct
  source 1..22: mol_type = other RNA
ctcccctgcttcttggccacgt

SEQ ID NO: 21270 - RNA, 22 nt, synthetic construct
  source 1..22: mol_type = other RNA
ctcccgcctcctccagatgggc

SEQ ID NO: 21271 - RNA, 22 nt, synthetic construct
  source 1..22: mol_type = other RNA
ctccctaagacccagaagtcca

SEQ ID NO: 21272 - RNA, 22 nt, synthetic construct
  source 1..22: mol_type = other RNA
ctccctcccgcctcctccagat

SEQ ID NO: 21273 - RNA, 22 nt, synthetic construct
  source 1..22: mol_type = other RNA
ctccctcggacccaggagtcca

SEQ ID NO: 21274 - RNA, 22 nt, synthetic construct
  source 1..22: mol_type = other RNA
ctccctctggagtcccgacttg

SEQ ID NO: 21275 - RNA, 22 nt, synthetic construct
  source 1..22: mol_type = other RNA
ctcccttccccgttcacttcct

SEQ ID NO: 21276 - RNA, 22 nt, synthetic construct
  source 1..22: mol_type = other RNA
ctccctttctctttctccatcc

SEQ ID NO: 21277 - RNA, 22 nt, synthetic construct
  source 1..22: mol_type = other RNA
ctccctttgtgagaatggtgcg

SEQ ID NO: 21278 - RNA, 22 nt, synthetic construct
  source 1..22: mol_type = other RNA
ctccgaccccctggacttcggc

SEQ ID NO: 21279 - RNA, 22 nt, synthetic construct
  source 1..22: mol_type = other RNA
ctccgcccagagcagggtcccg

SEQ ID NO: 21280 - RNA, 22 nt, synthetic construct
  source 1..22: mol_type = other RNA
ctccgggacctgaactggagct

SEQ ID NO: 21281 - RNA, 22 nt, synthetic construct
  source 1..22: mol_type = other RNA
ctccgtgcgtcagttttacctg

SEQ ID NO: 21282 - RNA, 22 nt, synthetic construct
  source 1..22: mol_type = other RNA
ctcctactctagcccccaaccc

SEQ ID NO: 21283 - RNA, 22 nt, synthetic construct
  source 1..22: mol_type = other RNA
ctcctagatccacgggataaat

SEQ ID NO: 21284 - RNA, 22 nt, synthetic construct
  source 1..22: mol_type = other RNA
ctcctcaccacagccctgccag

SEQ ID NO: 21285 - RNA, 22 nt, synthetic construct
  source 1..22: mol_type = other RNA
ctcctccaactgtggggtgact

SEQ ID NO: 21286 - RNA, 22 nt, synthetic construct
  source 1..22: mol_type = other RNA
ctcctccagatgggcagctttg

SEQ ID NO: 21287 - RNA, 22 nt, synthetic construct
  source 1..22: mol_type = other RNA
ctcctccgaccccctggacttc

SEQ ID NO: 21288 - RNA, 22 nt, synthetic construct
  source 1..22: mol_type = other RNA
ctcctccttcagagccaggagt

SEQ ID NO: 21289 - RNA, 22 nt, synthetic construct
  source 1..22: mol_type = other RNA
ctcctctctcaaacccaggagc

SEQ ID NO: 21290 - RNA, 22 nt, synthetic construct
  source 1..22: mol_type = other RNA
ctcctctctgaaccccagccca

SEQ ID NO: 21291 - RNA, 22 nt, synthetic construct
  source 1..22: mol_type = other RNA
ctcctcttgggaagtgtaagga

SEQ ID NO: 21292 - RNA, 22 nt, synthetic construct
  source 1..22: mol_type = other RNA
ctcctgccccttccctacaggg

SEQ ID NO: 21293 - RNA, 22 nt, synthetic construct
  source 1..22: mol_type = other RNA
ctcctgccttaaacccagccag

SEQ ID NO: 21294 - RNA, 22 nt, synthetic construct
  source 1..22: mol_type = other RNA
ctcctggctatctgcaaacagg

SEQ ID NO: 21295 - RNA, 22 nt, synthetic construct
  source 1..22: mol_type = other RNA
ctcctggctctgaaggaggagg

SEQ ID NO: 21296 - RNA, 22 nt, synthetic construct
  source 1..22: mol_type = other RNA
ctcctgggataccccgaagagt

SEQ ID NO: 21297 - RNA, 22 nt, synthetic construct
  source 1..22: mol_type = other RNA
ctcctgggcttgccaaggactc

SEQ ID NO: 21298 - RNA, 22 nt, synthetic construct
  source 1..22: mol_type = other RNA
ctcctgggtctgagggtggagg

SEQ ID NO: 21299 - RNA, 22 nt, synthetic construct
  source 1..22: mol_type = other RNA
ctcctgggttgaatggggaggg

SEQ ID NO: 21300 - RNA, 22 nt, synthetic construct
  source 1..22: mol_type = other RNA
ctcctgggtttgagagaggagg

SEQ ID NO: 21301 - RNA, 22 nt, synthetic construct
  source 1..22: mol_type = other RNA
ctccttcagagccaggagtcct

SEQ ID NO: 21302 - RNA, 22 nt, synthetic construct
  source 1..22: mol_type = other RNA
ctccttcatctgagggcggaag

SEQ ID NO: 21303 - RNA, 22 nt, synthetic construct
  source 1..22: mol_type = other RNA
ctccttcctcagctccagttca

SEQ ID NO: 21304 - RNA, 22 nt, synthetic construct
  source 1..22: mol_type = other RNA
ctccttgcccccctcccctatc

SEQ ID NO: 21305 - RNA, 22 nt, synthetic construct
  source 1..22: mol_type = other RNA
ctcggaaaccaccccagcagat

SEQ ID NO: 21306 - RNA, 22 nt, synthetic construct
  source 1..22: mol_type = other RNA
ctcggacccaggagtccaggcc

SEQ ID NO: 21307 - RNA, 22 nt, synthetic construct
  source 1..22: mol_type = other RNA
ctcggctcgtttatttccaccc

SEQ ID NO: 21308 - RNA, 22 nt, synthetic construct
  source 1..22: mol_type = other RNA
ctcgggctgtgaaggggccgca

SEQ ID NO: 21309 - RNA, 22 nt, synthetic construct
  source 1..22: mol_type = other RNA
ctcgtagctccctcccgcctcc

SEQ ID NO: 21310 - RNA, 22 nt, synthetic construct
  source 1..22: mol_type = other RNA
ctcgtccaccatctcatgcccc

SEQ ID NO: 21311 - RNA, 22 nt, synthetic construct
  source 1..22: mol_type = other RNA
ctcgtcctgcatccttctccag

SEQ ID NO: 21312 - RNA, 22 nt, synthetic construct
  source 1..22: mol_type = other RNA
ctcgtggggtccaggccaagta

SEQ ID NO: 21313 - RNA, 22 nt, synthetic construct
  source 1..22: mol_type = other RNA
ctcgtgggtctgagggaggagg

SEQ ID NO: 21314 - RNA, 22 nt, synthetic construct
  source 1..22: mol_type = other RNA
ctcgtttatttccacccagttg

SEQ ID NO: 21315 - RNA, 22 nt, synthetic construct
  source 1..22: mol_type = other RNA
ctctactccctttctctttctc

SEQ ID NO: 21316 - RNA, 22 nt, synthetic construct
  source 1..22: mol_type = other RNA
ctctagcccccaaccccctagc

SEQ ID NO: 21317 - RNA, 22 nt, synthetic construct
  source 1..22: mol_type = other RNA
ctctcaaacccaggagcccagg

SEQ ID NO: 21318 - RNA, 22 nt, synthetic construct
  source 1..22: mol_type = other RNA
ctctccaaagctgcccatctgg

SEQ ID NO: 21319 - RNA, 22 nt, synthetic construct
  source 1..22: mol_type = other RNA
ctctcccagaacctgagctgct

SEQ ID NO: 21320 - RNA, 22 nt, synthetic construct
  source 1..22: mol_type = other RNA
ctctccccattcagacccaggg

SEQ ID NO: 21321 - RNA, 22 nt, synthetic construct
  source 1..22: mol_type = other RNA
ctctcctgccccttccctacag

SEQ ID NO: 21322 - RNA, 22 nt, synthetic construct
  source 1..22: mol_type = other RNA
ctctcctgggcttgccaaggac

SEQ ID NO: 21323 - RNA, 22 nt, synthetic construct
  source 1..22: mol_type = other RNA
ctctccttgcccccctccccta

SEQ ID NO: 21324 - RNA, 22 nt, synthetic construct
  source 1..22: mol_type = other RNA
ctctcgtggggtccaggccaag

SEQ ID NO: 21325 - RNA, 22 nt, synthetic construct
  source 1..22: mol_type = other RNA
ctctctcaaacccaggagccca

SEQ ID NO: 21326 - RNA, 22 nt, synthetic construct
  source 1..22: mol_type = other RNA
ctctctgaaccccagcccaccc

SEQ ID NO: 21327 - RNA, 22 nt, synthetic construct
  source 1..22: mol_type = other RNA
ctctgaaccccagcccacccca

SEQ ID NO: 21328 - RNA, 22 nt, synthetic construct
  source 1..22: mol_type = other RNA
ctctgaaggaggaggggctgga

SEQ ID NO: 21329 - RNA, 22 nt, synthetic construct
  source 1..22: mol_type = other RNA
ctctgacgcggccgtctggtgc

SEQ ID NO: 21330 - RNA, 22 nt, synthetic construct
  source 1..22: mol_type = other RNA
ctctgcacggggccctgcagcc

SEQ ID NO: 21331 - RNA, 22 nt, synthetic construct
  source 1..22: mol_type = other RNA
ctctgcaggaacgaagccgtgg

SEQ ID NO: 21332 - RNA, 22 nt, synthetic construct
  source 1..22: mol_type = other RNA
ctctgctcttcagactgagccc

SEQ ID NO: 21333 - RNA, 22 nt, synthetic construct
  source 1..22: mol_type = other RNA
ctctggagtcccgacttgctgg

SEQ ID NO: 21334 - RNA, 22 nt, synthetic construct
  source 1..22: mol_type = other RNA
ctctggagtccctggtgcccag

SEQ ID NO: 21335 - RNA, 22 nt, synthetic construct
  source 1..22: mol_type = other RNA
ctctggccactggctgtttaag

SEQ ID NO: 21336 - RNA, 22 nt, synthetic construct
  source 1..22: mol_type = other RNA
ctctgggagtcccgcccaggcc

SEQ ID NO: 21337 - RNA, 22 nt, synthetic construct
  source 1..22: mol_type = other RNA
ctctgggcggaggaatatgtcc

SEQ ID NO: 21338 - RNA, 22 nt, synthetic construct
  source 1..22: mol_type = other RNA
ctctgggcttctgggtttgagt

SEQ ID NO: 21339 - RNA, 22 nt, synthetic construct
  source 1..22: mol_type = other RNA
ctctgggggatgcaggggaagg

SEQ ID NO: 21340 - RNA, 22 nt, synthetic construct
  source 1..22: mol_type = other RNA
ctctgggtgactcttgattccc

SEQ ID NO: 21341 - RNA, 22 nt, synthetic construct
  source 1..22: mol_type = other RNA
ctctgttcagccctaagaatcc

SEQ ID NO: 21342 - RNA, 22 nt, synthetic construct
  source 1..22: mol_type = other RNA
ctcttcacctttctagtcccca

SEQ ID NO: 21343 - RNA, 22 nt, synthetic construct
  source 1..22: mol_type = other RNA
ctcttcagactgagccccgttc

SEQ ID NO: 21344 - RNA, 22 nt, synthetic construct
  source 1..22: mol_type = other RNA
ctcttccctagtctgagcactg

SEQ ID NO: 21345 - RNA, 22 nt, synthetic construct
  source 1..22: mol_type = other RNA
ctcttcggggtatcccaggagg

SEQ ID NO: 21346 - RNA, 22 nt, synthetic construct
  source 1..22: mol_type = other RNA
ctcttctctgttcagccctaag

SEQ ID NO: 21347 - RNA, 22 nt, synthetic construct
  source 1..22: mol_type = other RNA
ctcttgattcccggccagtttc

SEQ ID NO: 21348 - RNA, 22 nt, synthetic construct
  source 1..22: mol_type = other RNA
ctcttggccctcgtagctccct

SEQ ID NO: 21349 - RNA, 22 nt, synthetic construct
  source 1..22: mol_type = other RNA
ctcttgggaagtgtaaggaagc

SEQ ID NO: 21350 - RNA, 22 nt, synthetic construct
  source 1..22: mol_type = other RNA
ctctttaaggaaagaaggatgg

SEQ ID NO: 21351 - RNA, 22 nt, synthetic construct
  source 1..22: mol_type = other RNA
ctctttctccatccttctttcc

SEQ ID NO: 21352 - RNA, 22 nt, synthetic construct
  source 1..22: mol_type = other RNA
ctgaaaccctcagtcctaggaa

SEQ ID NO: 21353 - RNA, 22 nt, synthetic construct
  source 1..22: mol_type = other RNA
ctgaacagagaagagctggggg

SEQ ID NO: 21354 - RNA, 22 nt, synthetic construct
  source 1..22: mol_type = other RNA
ctgaaccccagcccaccccaat

SEQ ID NO: 21355 - RNA, 22 nt, synthetic construct
  source 1..22: mol_type = other RNA
ctgaactggagctgaggaagga

SEQ ID NO: 21356 - RNA, 22 nt, synthetic construct
  source 1..22: mol_type = other RNA
ctgaagagcagagccaggaacc

SEQ ID NO: 21357 - RNA, 22 nt, synthetic construct
  source 1..22: mol_type = other RNA
ctgaaggaggaggggctggaac

SEQ ID NO: 21358 - RNA, 22 nt, synthetic construct
  source 1..22: mol_type = other RNA
ctgaaggcctggccggcctgac

SEQ ID NO: 21359 - RNA, 22 nt, synthetic construct
  source 1..22: mol_type = other RNA
ctgaatggggagaggctggggg

SEQ ID NO: 21360 - RNA, 22 nt, synthetic construct
  source 1..22: mol_type = other RNA
ctgacacgggccaccgtttctc

SEQ ID NO: 21361 - RNA, 22 nt, synthetic construct
  source 1..22: mol_type = other RNA
ctgaccactgggcaaccaggcg

SEQ ID NO: 21362 - RNA, 22 nt, synthetic construct
  source 1..22: mol_type = other RNA
ctgacccaaacccagctcccct

SEQ ID NO: 21363 - RNA, 22 nt, synthetic construct
  source 1..22: mol_type = other RNA
ctgacgcacggaggaacaatat

SEQ ID NO: 21364 - RNA, 22 nt, synthetic construct
  source 1..22: mol_type = other RNA
ctgacgcggccgtctggtgcgt

SEQ ID NO: 21365 - RNA, 22 nt, synthetic construct
  source 1..22: mol_type = other RNA
ctgagaaccgggcaggtcacgc

SEQ ID NO: 21366 - RNA, 22 nt, synthetic construct
  source 1..22: mol_type = other RNA
ctgagaagggaatccctcctct

SEQ ID NO: 21367 - RNA, 22 nt, synthetic construct
  source 1..22: mol_type = other RNA
ctgagcactgaaggcctggccg

SEQ ID NO: 21368 - RNA, 22 nt, synthetic construct
  source 1..22: mol_type = other RNA
ctgagcactggaagcgccacct

SEQ ID NO: 21369 - RNA, 22 nt, synthetic construct
  source 1..22: mol_type = other RNA
ctgagccccgttcccctgcatc

SEQ ID NO: 21370 - RNA, 22 nt, synthetic construct
  source 1..22: mol_type = other RNA
ctgagcgcctctcctgggcttg

SEQ ID NO: 21371 - RNA, 22 nt, synthetic construct
  source 1..22: mol_type = other RNA
ctgagctgctctgacgcggccg

SEQ ID NO: 21372 - RNA, 22 nt, synthetic construct
  source 1..22: mol_type = other RNA
ctgaggaaggagtgaagctaaa

SEQ ID NO: 21373 - RNA, 22 nt, synthetic construct
  source 1..22: mol_type = other RNA
ctgaggccccctctgcacgggg

SEQ ID NO: 21374 - RNA, 22 nt, synthetic construct
  source 1..22: mol_type = other RNA
ctgaggcctgggcaccagggac

SEQ ID NO: 21375 - RNA, 22 nt, synthetic construct
  source 1..22: mol_type = other RNA
ctgagggcggaagggctggggc

SEQ ID NO: 21376 - RNA, 22 nt, synthetic construct
  source 1..22: mol_type = other RNA
ctgagggtggagggactggggg

SEQ ID NO: 21377 - RNA, 22 nt, synthetic construct
  source 1..22: mol_type = other RNA
ctgagggtttcagtgctaaaac

SEQ ID NO: 21378 - RNA, 22 nt, synthetic construct
  source 1..22: mol_type = other RNA
ctgagtctgtcccagcacaggg

SEQ ID NO: 21379 - RNA, 22 nt, synthetic construct
  source 1..22: mol_type = other RNA
ctgagttctaactttggctctt

SEQ ID NO: 21380 - RNA, 22 nt, synthetic construct
  source 1..22: mol_type = other RNA
ctgatcctggtgctgcagcttc

SEQ ID NO: 21381 - RNA, 22 nt, synthetic construct
  source 1..22: mol_type = other RNA
ctgattttgtttttccaaactg

SEQ ID NO: 21382 - RNA, 22 nt, synthetic construct
  source 1..22: mol_type = other RNA
ctgcaaacaggaagtgaacggg

SEQ ID NO: 21383 - RNA, 22 nt, synthetic construct
  source 1..22: mol_type = other RNA
ctgcacacctgtgtgcctgggc

SEQ ID NO: 21384 - RNA, 22 nt, synthetic construct
  source 1..22: mol_type = other RNA
ctgcaccccaattgccttagtg

SEQ ID NO: 21385 - RNA, 22 nt, synthetic construct
  source 1..22: mol_type = other RNA
ctgcacggggccctgcagccag

SEQ ID NO: 21386 - RNA, 22 nt, synthetic construct
  source 1..22: mol_type = other RNA
ctgcagagtatctgctggggtg

SEQ ID NO: 21387 - RNA, 22 nt, synthetic construct
  source 1..22: mol_type = other RNA
ctgcagcaccaggatcagtgaa

SEQ ID NO: 21388 - RNA, 22 nt, synthetic construct
  source 1..22: mol_type = other RNA
ctgcagccaggggctgacacgg

SEQ ID NO: 21389 - RNA, 22 nt, synthetic construct
  source 1..22: mol_type = other RNA
ctgcagcttccttacacttccc

SEQ ID NO: 21390 - RNA, 22 nt, synthetic construct
  source 1..22: mol_type = other RNA
ctgcaggaacgaagccgtgggc

SEQ ID NO: 21391 - RNA, 22 nt, synthetic construct
  source 1..22: mol_type = other RNA
ctgcagggccccgtgcagaggg

SEQ ID NO: 21392 - RNA, 22 nt, synthetic construct
  source 1..22: mol_type = other RNA
ctgcatagccctgggcccacgg

SEQ ID NO: 21393 - RNA, 22 nt, synthetic construct
  source 1..22: mol_type = other RNA
ctgcatcccccagaggccccag

SEQ ID NO: 21394 - RNA, 22 nt, synthetic construct
  source 1..22: mol_type = other RNA
ctgcatcccccttcccctgcat

SEQ ID NO: 21395 - RNA, 22 nt, synthetic construct
  source 1..22: mol_type = other RNA
ctgcatccccgttcccctgcat

SEQ ID NO: 21396 - RNA, 22 nt, synthetic construct
  source 1..22: mol_type = other RNA
ctgcatccttctccaggcaggt

SEQ ID NO: 21397 - RNA, 22 nt, synthetic construct
  source 1..22: mol_type = other RNA
ctgccaggacggggctggctac

SEQ ID NO: 21398 - RNA, 22 nt, synthetic construct
  source 1..22: mol_type = other RNA
ctgcccagtacaggcatccctg

SEQ ID NO: 21399 - RNA, 22 nt, synthetic construct
  source 1..22: mol_type = other RNA
ctgcccatctggaggaggcggg

SEQ ID NO: 21400 - RNA, 22 nt, synthetic construct
  source 1..22: mol_type = other RNA
ctgcccccattcctgcacccca

SEQ ID NO: 21401 - RNA, 22 nt, synthetic construct
  source 1..22: mol_type = other RNA
ctgccccttccctacaggggtt

SEQ ID NO: 21402 - RNA, 22 nt, synthetic construct
  source 1..22: mol_type = other RNA
ctgcccggttctcagtggccac

SEQ ID NO: 21403 - RNA, 22 nt, synthetic construct
  source 1..22: mol_type = other RNA
ctgcctggagaaggatgcagga

SEQ ID NO: 21404 - RNA, 22 nt, synthetic construct
  source 1..22: mol_type = other RNA
ctgccttaaacccagccaggtc

SEQ ID NO: 21405 - RNA, 22 nt, synthetic construct
  source 1..22: mol_type = other RNA
ctgccttttgggtggattctcc

SEQ ID NO: 21406 - RNA, 22 nt, synthetic construct
  source 1..22: mol_type = other RNA
ctgcgctaccctctcccagaac

SEQ ID NO: 21407 - RNA, 22 nt, synthetic construct
  source 1..22: mol_type = other RNA
ctgctctgacgcggccgtctgg

SEQ ID NO: 21408 - RNA, 22 nt, synthetic construct
  source 1..22: mol_type = other RNA
ctgctctgggcggaggaatatg

SEQ ID NO: 21409 - RNA, 22 nt, synthetic construct
  source 1..22: mol_type = other RNA
ctgctctgggcttctgggtttg

SEQ ID NO: 21410 - RNA, 22 nt, synthetic construct
  source 1..22: mol_type = other RNA
ctgctcttcagactgagccccg

SEQ ID NO: 21411 - RNA, 22 nt, synthetic construct
  source 1..22: mol_type = other RNA
ctgctggggtggtttccgagct

SEQ ID NO: 21412 - RNA, 22 nt, synthetic construct
  source 1..22: mol_type = other RNA
ctgctgtggctgttcccaagtt

SEQ ID NO: 21413 - RNA, 22 nt, synthetic construct
  source 1..22: mol_type = other RNA
ctgcttctcctcttgggaagtg

SEQ ID NO: 21414 - RNA, 22 nt, synthetic construct
  source 1..22: mol_type = other RNA
ctgcttcttggccacgtaacct

SEQ ID NO: 21415 - RNA, 22 nt, synthetic construct
  source 1..22: mol_type = other RNA
ctgcttggcaaactcactcttc

SEQ ID NO: 21416 - RNA, 22 nt, synthetic construct
  source 1..22: mol_type = other RNA
ctggaacctcttccctagtctg

SEQ ID NO: 21417 - RNA, 22 nt, synthetic construct
  source 1..22: mol_type = other RNA
ctggaagcgccacctgtgggtg

SEQ ID NO: 21418 - RNA, 22 nt, synthetic construct
  source 1..22: mol_type = other RNA
ctggaccccacgagaggccacc

SEQ ID NO: 21419 - RNA, 22 nt, synthetic construct
  source 1..22: mol_type = other RNA
ctggacccctgggtctgaatgg

SEQ ID NO: 21420 - RNA, 22 nt, synthetic construct
  source 1..22: mol_type = other RNA
ctggactcctgggtctgagggt

SEQ ID NO: 21421 - RNA, 22 nt, synthetic construct
  source 1..22: mol_type = other RNA
ctggactccttcatctgagggc

SEQ ID NO: 21422 - RNA, 22 nt, synthetic construct
  source 1..22: mol_type = other RNA
ctggactctggagtccctggtg

SEQ ID NO: 21423 - RNA, 22 nt, synthetic construct
  source 1..22: mol_type = other RNA
ctggacttcggcttttgtcccc

SEQ ID NO: 21424 - RNA, 22 nt, synthetic construct
  source 1..22: mol_type = other RNA
ctggacttctgggtcttaggga

SEQ ID NO: 21425 - RNA, 22 nt, synthetic construct
  source 1..22: mol_type = other RNA
ctggagaaggatgcaggacgag

SEQ ID NO: 21426 - RNA, 22 nt, synthetic construct
  source 1..22: mol_type = other RNA
ctggagcattggggtgggctgg

SEQ ID NO: 21427 - RNA, 22 nt, synthetic construct
  source 1..22: mol_type = other RNA
ctggagccaggattcttagggc

SEQ ID NO: 21428 - RNA, 22 nt, synthetic construct
  source 1..22: mol_type = other RNA
ctggagctgaggaaggagtgaa

SEQ ID NO: 21429 - RNA, 22 nt, synthetic construct
  source 1..22: mol_type = other RNA
ctggaggaggcgggagggagct

SEQ ID NO: 21430 - RNA, 22 nt, synthetic construct
  source 1..22: mol_type = other RNA
ctggagtcccgacttgctggga

SEQ ID NO: 21431 - RNA, 22 nt, synthetic construct
  source 1..22: mol_type = other RNA
ctggagtccctggtgcccaggc

SEQ ID NO: 21432 - RNA, 22 nt, synthetic construct
  source 1..22: mol_type = other RNA
ctggagtgtgacagcctggggc

SEQ ID NO: 21433 - RNA, 22 nt, synthetic construct
  source 1..22: mol_type = other RNA
ctggatctgttttcgtggctcc

SEQ ID NO: 21434 - RNA, 22 nt, synthetic construct
  source 1..22: mol_type = other RNA
ctggcagggctgtggtgaggag

SEQ ID NO: 21435 - RNA, 22 nt, synthetic construct
  source 1..22: mol_type = other RNA
ctggccactggctgtttaagat

SEQ ID NO: 21436 - RNA, 22 nt, synthetic construct
  source 1..22: mol_type = other RNA
ctggcccccagcccctcctgcc

SEQ ID NO: 21437 - RNA, 22 nt, synthetic construct
  source 1..22: mol_type = other RNA
ctggccggcctgaccactgggc

SEQ ID NO: 21438 - RNA, 22 nt, synthetic construct
  source 1..22: mol_type = other RNA
ctggccgggaatcaagagtcac

SEQ ID NO: 21439 - RNA, 22 nt, synthetic construct
  source 1..22: mol_type = other RNA
ctggcctcctgggttgaatggg

SEQ ID NO: 21440 - RNA, 22 nt, synthetic construct
  source 1..22: mol_type = other RNA
ctggccttatctcacaggtaaa

SEQ ID NO: 21441 - RNA, 22 nt, synthetic construct
  source 1..22: mol_type = other RNA
ctggctactggccttatctcac

SEQ ID NO: 21442 - RNA, 22 nt, synthetic construct
  source 1..22: mol_type = other RNA
ctggctatctgcaaacaggaag

SEQ ID NO: 21443 - RNA, 22 nt, synthetic construct
  source 1..22: mol_type = other RNA
ctggctccagcccctcctactc

SEQ ID NO: 21444 - RNA, 22 nt, synthetic construct
  source 1..22: mol_type = other RNA
ctggctctcctgccccttccct

SEQ ID NO: 21445 - RNA, 22 nt, synthetic construct
  source 1..22: mol_type = other RNA
ctggctctgaaggaggaggggc

SEQ ID NO: 21446 - RNA, 22 nt, synthetic construct
  source 1..22: mol_type = other RNA
ctggctctgctcttcagactga

SEQ ID NO: 21447 - RNA, 22 nt, synthetic construct
  source 1..22: mol_type = other RNA
ctggctgcagggccccgtgcag

SEQ ID NO: 21448 - RNA, 22 nt, synthetic construct
  source 1..22: mol_type = other RNA
ctggctgggtttaaggcaggag

SEQ ID NO: 21449 - RNA, 22 nt, synthetic construct
  source 1..22: mol_type = other RNA
ctggctgtttaagatacgcctg

SEQ ID NO: 21450 - RNA, 22 nt, synthetic construct
  source 1..22: mol_type = other RNA
ctgggaacgggatgaactcggc

SEQ ID NO: 21451 - RNA, 22 nt, synthetic construct
  source 1..22: mol_type = other RNA
ctgggacagactcaggggcctg

SEQ ID NO: 21452 - RNA, 22 nt, synthetic construct
  source 1..22: mol_type = other RNA
ctgggacatattcctccgccca

SEQ ID NO: 21453 - RNA, 22 nt, synthetic construct
  source 1..22: mol_type = other RNA
ctgggagagggtagcgcagggt

SEQ ID NO: 21454 - RNA, 22 nt, synthetic construct
  source 1..22: mol_type = other RNA
ctgggagtcccgcccaggcccc

SEQ ID NO: 21455 - RNA, 22 nt, synthetic construct
  source 1..22: mol_type = other RNA
ctgggataccccgaagagtgag

SEQ ID NO: 21456 - RNA, 22 nt, synthetic construct
  source 1..22: mol_type = other RNA
ctgggcaaacagcataagctgg

SEQ ID NO: 21457 - RNA, 22 nt, synthetic construct
  source 1..22: mol_type = other RNA
ctgggcaaccaggcgtatctta

SEQ ID NO: 21458 - RNA, 22 nt, synthetic construct
  source 1..22: mol_type = other RNA
ctgggcaccagggactccagag

SEQ ID NO: 21459 - RNA, 22 nt, synthetic construct
  source 1..22: mol_type = other RNA
ctgggcaggtccttgaaaggga

SEQ ID NO: 21460 - RNA, 22 nt, synthetic construct
  source 1..22: mol_type = other RNA
ctgggcccacggcttcgttcct

SEQ ID NO: 21461 - RNA, 22 nt, synthetic construct
  source 1..22: mol_type = other RNA
ctgggccccaggctgtcacact

SEQ ID NO: 21462 - RNA, 22 nt, synthetic construct
  source 1..22: mol_type = other RNA
ctgggcctggacccctgggtct

SEQ ID NO: 21463 - RNA, 22 nt, synthetic construct
  source 1..22: mol_type = other RNA
ctgggcggaggaatatgtccca

SEQ ID NO: 21464 - RNA, 22 nt, synthetic construct
  source 1..22: mol_type = other RNA
ctgggcgggactcccagagggg

SEQ ID NO: 21465 - RNA, 22 nt, synthetic construct
  source 1..22: mol_type = other RNA
ctgggctcctgggtttgagaga

SEQ ID NO: 21466 - RNA, 22 nt, synthetic construct
  source 1..22: mol_type = other RNA
ctgggcttctgggtttgagtcc

SEQ ID NO: 21467 - RNA, 22 nt, synthetic construct
  source 1..22: mol_type = other RNA
ctgggcttgccaaggactcaaa

SEQ ID NO: 21468 - RNA, 22 nt, synthetic construct
  source 1..22: mol_type = other RNA
ctggggactctttaaggaaaga

SEQ ID NO: 21469 - RNA, 22 nt, synthetic construct
  source 1..22: mol_type = other RNA
ctggggcaagtccctcctccga

SEQ ID NO: 21470 - RNA, 22 nt, synthetic construct
  source 1..22: mol_type = other RNA
ctggggcccaggcacacaggtg

SEQ ID NO: 21471 - RNA, 22 nt, synthetic construct
  source 1..22: mol_type = other RNA
ctggggcctctgggggatgcag

SEQ ID NO: 21472 - RNA, 22 nt, synthetic construct
  source 1..22: mol_type = other RNA
ctggggcctggactcctgggtc

SEQ ID NO: 21473 - RNA, 22 nt, synthetic construct
  source 1..22: mol_type = other RNA
ctggggcctggcctcctgggtt

SEQ ID NO: 21474 - RNA, 22 nt, synthetic construct
  source 1..22: mol_type = other RNA
ctggggctgtgtttctcgtcct

SEQ ID NO: 21475 - RNA, 22 nt, synthetic construct
  source 1..22: mol_type = other RNA
ctgggggatgcaggggaagggg

SEQ ID NO: 21476 - RNA, 22 nt, synthetic construct
  source 1..22: mol_type = other RNA
ctgggggccaggactcctggct

SEQ ID NO: 21477 - RNA, 22 nt, synthetic construct
  source 1..22: mol_type = other RNA
ctgggggcctggactccttcat

SEQ ID NO: 21478 - RNA, 22 nt, synthetic construct
  source 1..22: mol_type = other RNA
ctgggggcctggacttctgggt

SEQ ID NO: 21479 - RNA, 22 nt, synthetic construct
  source 1..22: mol_type = other RNA
ctgggggcctgggctcctgggt

SEQ ID NO: 21480 - RNA, 22 nt, synthetic construct
  source 1..22: mol_type = other RNA
ctggggtggcctctcgtggggt

SEQ ID NO: 21481 - RNA, 22 nt, synthetic construct
  source 1..22: mol_type = other RNA
ctggggtggtttccgagcttga

SEQ ID NO: 21482 - RNA, 22 nt, synthetic construct
  source 1..22: mol_type = other RNA
ctggggttcagagaggagggat

SEQ ID NO: 21483 - RNA, 22 nt, synthetic construct
  source 1..22: mol_type = other RNA
ctgggtctgaatggggagaggc

SEQ ID NO: 21484 - RNA, 22 nt, synthetic construct
  source 1..22: mol_type = other RNA
ctgggtctgagggtggagggac

SEQ ID NO: 21485 - RNA, 22 nt, synthetic construct
  source 1..22: mol_type = other RNA
ctgggtcttagggaggcggggc

SEQ ID NO: 21486 - RNA, 22 nt, synthetic construct
  source 1..22: mol_type = other RNA
ctgggtgactcttgattcccgg

SEQ ID NO: 21487 - RNA, 22 nt, synthetic construct
  source 1..22: mol_type = other RNA
ctgggtgcgggaaccccacatg

SEQ ID NO: 21488 - RNA, 22 nt, synthetic construct
  source 1..22: mol_type = other RNA
ctgggtggaaataaacgagccg

SEQ ID NO: 21489 - RNA, 22 nt, synthetic construct
  source 1..22: mol_type = other RNA
ctgggtgggctccgggacctga

SEQ ID NO: 21490 - RNA, 22 nt, synthetic construct
  source 1..22: mol_type = other RNA
ctgggtgtggggtgaccagctt

SEQ ID NO: 21491 - RNA, 22 nt, synthetic construct
  source 1..22: mol_type = other RNA
ctgggttgaatggggaggggtt

SEQ ID NO: 21492 - RNA, 22 nt, synthetic construct
  source 1..22: mol_type = other RNA
ctgggtttaaggcaggaggggc

SEQ ID NO: 21493 - RNA, 22 nt, synthetic construct
  source 1..22: mol_type = other RNA
ctgggtttgagagaggaggggc

SEQ ID NO: 21494 - RNA, 22 nt, synthetic construct
  source 1..22: mol_type = other RNA
ctgggtttgagtccttggcaag

SEQ ID NO: 21495 - RNA, 22 nt, synthetic construct
  source 1..22: mol_type = other RNA
ctgggtttgggtcaggtctggg

SEQ ID NO: 21496 - RNA, 22 nt, synthetic construct
  source 1..22: mol_type = other RNA
ctggtaccctgcccccattcct

SEQ ID NO: 21497 - RNA, 22 nt, synthetic construct
  source 1..22: mol_type = other RNA
ctggtagacagggctggggtgg

SEQ ID NO: 21498 - RNA, 22 nt, synthetic construct
  source 1..22: mol_type = other RNA
ctggtcaccccacacccagacc

SEQ ID NO: 21499 - RNA, 22 nt, synthetic construct
  source 1..22: mol_type = other RNA
ctggtgaacacctaggacgcac

SEQ ID NO: 21500 - RNA, 22 nt, synthetic construct
  source 1..22: mol_type = other RNA
ctggtgcccaggcctcaggcat

SEQ ID NO: 21501 - RNA, 22 nt, synthetic construct
  source 1..22: mol_type = other RNA
ctggtgcgtttcactgatcctg

SEQ ID NO: 21502 - RNA, 22 nt, synthetic construct
  source 1..22: mol_type = other RNA
ctggtgctgcagcttccttaca

SEQ ID NO: 21503 - RNA, 22 nt, synthetic construct
  source 1..22: mol_type = other RNA
ctggttgcccagtggtcaggcc

SEQ ID NO: 21504 - RNA, 22 nt, synthetic construct
  source 1..22: mol_type = other RNA
ctgtactgggcaggtccttgaa

SEQ ID NO: 21505 - RNA, 22 nt, synthetic construct
  source 1..22: mol_type = other RNA
ctgtagggaaggggcaggagag

SEQ ID NO: 21506 - RNA, 22 nt, synthetic construct
  source 1..22: mol_type = other RNA
ctgtcacactccagttcactga

SEQ ID NO: 21507 - RNA, 22 nt, synthetic construct
  source 1..22: mol_type = other RNA
ctgtcccagcacagggtggcct

SEQ ID NO: 21508 - RNA, 22 nt, synthetic construct
  source 1..22: mol_type = other RNA
ctgtcccccttcctcgtccacc

SEQ ID NO: 21509 - RNA, 22 nt, synthetic construct
  source 1..22: mol_type = other RNA
ctgtcctagcaccgtgtccctg

SEQ ID NO: 21510 - RNA, 22 nt, synthetic construct
  source 1..22: mol_type = other RNA
ctgtcctgggcaaacagcataa

SEQ ID NO: 21511 - RNA, 22 nt, synthetic construct
  source 1..22: mol_type = other RNA
ctgtctaccaggctgccttttg

SEQ ID NO: 21512 - RNA, 22 nt, synthetic construct
  source 1..22: mol_type = other RNA
ctgtctcacccctctgggagtc

SEQ ID NO: 21513 - RNA, 22 nt, synthetic construct
  source 1..22: mol_type = other RNA
ctgtctctgggtgactcttgat

SEQ ID NO: 21514 - RNA, 22 nt, synthetic construct
  source 1..22: mol_type = other RNA
ctgtgaaagatgcctgaggcct

SEQ ID NO: 21515 - RNA, 22 nt, synthetic construct
  source 1..22: mol_type = other RNA
ctgtgaaggggccgcacgtgcc

SEQ ID NO: 21516 - RNA, 22 nt, synthetic construct
  source 1..22: mol_type = other RNA
ctgtgagataaggccagtagcc

SEQ ID NO: 21517 - RNA, 22 nt, synthetic construct
  source 1..22: mol_type = other RNA
ctgtgctgggacagactcaggg

SEQ ID NO: 21518 - RNA, 22 nt, synthetic construct
  source 1..22: mol_type = other RNA
ctgtggctgttcccaagttctt

SEQ ID NO: 21519 - RNA, 22 nt, synthetic construct
  source 1..22: mol_type = other RNA
ctgtggggtgactgcttggcaa

SEQ ID NO: 21520 - RNA, 22 nt, synthetic construct
  source 1..22: mol_type = other RNA
ctgtgggtggtgacgggggttt

SEQ ID NO: 21521 - RNA, 22 nt, synthetic construct
  source 1..22: mol_type = other RNA
ctgtggtgaggaggggggtgtc

SEQ ID NO: 21522 - RNA, 22 nt, synthetic construct
  source 1..22: mol_type = other RNA
ctgtgtgcctgggccccaggct

SEQ ID NO: 21523 - RNA, 22 nt, synthetic construct
  source 1..22: mol_type = other RNA
ctgtgtttctcgtcctgcatcc

SEQ ID NO: 21524 - RNA, 22 nt, synthetic construct
  source 1..22: mol_type = other RNA
ctgttagacacggcaaaacccc

SEQ ID NO: 21525 - RNA, 22 nt, synthetic construct
  source 1..22: mol_type = other RNA
ctgttcagccctaagaatcctg

SEQ ID NO: 21526 - RNA, 22 nt, synthetic construct
  source 1..22: mol_type = other RNA
ctgttcccaagttcttagggta

SEQ ID NO: 21527 - RNA, 22 nt, synthetic construct
  source 1..22: mol_type = other RNA
ctgttgggtcattttccccact

SEQ ID NO: 21528 - RNA, 22 nt, synthetic construct
  source 1..22: mol_type = other RNA
ctgtttaagatacgcctggttg

SEQ ID NO: 21529 - RNA, 22 nt, synthetic construct
  source 1..22: mol_type = other RNA
ctgtttgcagatagccaggagt

SEQ ID NO: 21530 - RNA, 22 nt, synthetic construct
  source 1..22: mol_type = other RNA
ctgtttgcccaggacagcctag

SEQ ID NO: 21531 - RNA, 22 nt, synthetic construct
  source 1..22: mol_type = other RNA
ctgttttcctaggactgagggt

SEQ ID NO: 21532 - RNA, 22 nt, synthetic construct
  source 1..22: mol_type = other RNA
ctgttttcgtggctccctctgg

SEQ ID NO: 21533 - RNA, 22 nt, synthetic construct
  source 1..22: mol_type = other RNA
cttaaacagccagtggccagag

SEQ ID NO: 21534 - RNA, 22 nt, synthetic construct
  source 1..22: mol_type = other RNA
cttaaacccagccaggtccttc

SEQ ID NO: 21535 - RNA, 22 nt, synthetic construct
  source 1..22: mol_type = other RNA
cttaaagagtccccagtgctat

SEQ ID NO: 21536 - RNA, 22 nt, synthetic construct
  source 1..22: mol_type = other RNA
cttacacttcccaagaggagaa

SEQ ID NO: 21537 - RNA, 22 nt, synthetic construct
  source 1..22: mol_type = other RNA
cttagggaagcgggaccctgct

SEQ ID NO: 21538 - RNA, 22 nt, synthetic construct
  source 1..22: mol_type = other RNA
cttagggaggcggggctgggcc

SEQ ID NO: 21539 - RNA, 22 nt, synthetic construct
  source 1..22: mol_type = other RNA
cttagggctgaacagagaagag

SEQ ID NO: 21540 - RNA, 22 nt, synthetic construct
  source 1..22: mol_type = other RNA
cttaggggtccaaaacttgggg

SEQ ID NO: 21541 - RNA, 22 nt, synthetic construct
  source 1..22: mol_type = other RNA
cttagggtaccccacgtgggtt

SEQ ID NO: 21542 - RNA, 22 nt, synthetic construct
  source 1..22: mol_type = other RNA
cttagtggctagggggttgggg

SEQ ID NO: 21543 - RNA, 22 nt, synthetic construct
  source 1..22: mol_type = other RNA
cttatctcacaggtaaaactga

SEQ ID NO: 21544 - RNA, 22 nt, synthetic construct
  source 1..22: mol_type = other RNA
cttatgctgtttgcccaggaca

SEQ ID NO: 21545 - RNA, 22 nt, synthetic construct
  source 1..22: mol_type = other RNA
cttattctgattttgtttttcc

SEQ ID NO: 21546 - RNA, 22 nt, synthetic construct
  source 1..22: mol_type = other RNA
cttcacagcccgagtttccatg

SEQ ID NO: 21547 - RNA, 22 nt, synthetic construct
  source 1..22: mol_type = other RNA
cttcacctttctagtccccaat

SEQ ID NO: 21548 - RNA, 22 nt, synthetic construct
  source 1..22: mol_type = other RNA
cttcactccttcctcagctcca

SEQ ID NO: 21549 - RNA, 22 nt, synthetic construct
  source 1..22: mol_type = other RNA
cttcagactgagccccgttccc

SEQ ID NO: 21550 - RNA, 22 nt, synthetic construct
  source 1..22: mol_type = other RNA
cttcagagccaggagtcctggc

SEQ ID NO: 21551 - RNA, 22 nt, synthetic construct
  source 1..22: mol_type = other RNA
cttcagtgctcagtggaaacca

SEQ ID NO: 21552 - RNA, 22 nt, synthetic construct
  source 1..22: mol_type = other RNA
cttcatctgagggcggaagggc

SEQ ID NO: 21553 - RNA, 22 nt, synthetic construct
  source 1..22: mol_type = other RNA
cttccaagggtcaagctcggaa

SEQ ID NO: 21554 - RNA, 22 nt, synthetic construct
  source 1..22: mol_type = other RNA
cttccagtgctcagactaggga

SEQ ID NO: 21555 - RNA, 22 nt, synthetic construct
  source 1..22: mol_type = other RNA
cttcccaagaggagaagcagtt

SEQ ID NO: 21556 - RNA, 22 nt, synthetic construct
  source 1..22: mol_type = other RNA
cttccccgttcacttcctgttt

SEQ ID NO: 21557 - RNA, 22 nt, synthetic construct
  source 1..22: mol_type = other RNA
cttcccctgcatcccccagagg

SEQ ID NO: 21558 - RNA, 22 nt, synthetic construct
  source 1..22: mol_type = other RNA
cttccctaaggccctgctctgg

SEQ ID NO: 21559 - RNA, 22 nt, synthetic construct
  source 1..22: mol_type = other RNA
cttccctacaggggttcctggc

SEQ ID NO: 21560 - RNA, 22 nt, synthetic construct
  source 1..22: mol_type = other RNA
cttccctagtctgagcactgga

SEQ ID NO: 21561 - RNA, 22 nt, synthetic construct
  source 1..22: mol_type = other RNA
cttccctgtcccccttcctcgt

SEQ ID NO: 21562 - RNA, 22 nt, synthetic construct
  source 1..22: mol_type = other RNA
cttcccttaggggtccaaaact

SEQ ID NO: 21563 - RNA, 22 nt, synthetic construct
  source 1..22: mol_type = other RNA
cttccgccctcagatgaaggag

SEQ ID NO: 21564 - RNA, 22 nt, synthetic construct
  source 1..22: mol_type = other RNA
cttcctcagctccagttcaggt

SEQ ID NO: 21565 - RNA, 22 nt, synthetic construct
  source 1..22: mol_type = other RNA
cttcctccaccctgcatagccc

SEQ ID NO: 21566 - RNA, 22 nt, synthetic construct
  source 1..22: mol_type = other RNA
cttcctcgtccaccatctcatg

SEQ ID NO: 21567 - RNA, 22 nt, synthetic construct
  source 1..22: mol_type = other RNA
cttcctgtttgcagatagccag

SEQ ID NO: 21568 - RNA, 22 nt, synthetic construct
  source 1..22: mol_type = other RNA
cttccttacacttcccaagagg

SEQ ID NO: 21569 - RNA, 22 nt, synthetic construct
  source 1..22: mol_type = other RNA
cttcggcttttgtccccccaag

SEQ ID NO: 21570 - RNA, 22 nt, synthetic construct
  source 1..22: mol_type = other RNA
cttcggggtatcccaggaggcc

SEQ ID NO: 21571 - RNA, 22 nt, synthetic construct
  source 1..22: mol_type = other RNA
cttcgttcctgcagagtatctg

SEQ ID NO: 21572 - RNA, 22 nt, synthetic construct
  source 1..22: mol_type = other RNA
cttctcaggttacgtggccaag

SEQ ID NO: 21573 - RNA, 22 nt, synthetic construct
  source 1..22: mol_type = other RNA
cttctcatctgggtgcgggaac

SEQ ID NO: 21574 - RNA, 22 nt, synthetic construct
  source 1..22: mol_type = other RNA
cttctccaggcaggtccccaag

SEQ ID NO: 21575 - RNA, 22 nt, synthetic construct
  source 1..22: mol_type = other RNA
cttctcctcttgggaagtgtaa

SEQ ID NO: 21576 - RNA, 22 nt, synthetic construct
  source 1..22: mol_type = other RNA
cttctctgttcagccctaagaa

SEQ ID NO: 21577 - RNA, 22 nt, synthetic construct
  source 1..22: mol_type = other RNA
cttctgggtcttagggaggcgg

SEQ ID NO: 21578 - RNA, 22 nt, synthetic construct
  source 1..22: mol_type = other RNA
cttctgggtttgagtccttggc

SEQ ID NO: 21579 - RNA, 22 nt, synthetic construct
  source 1..22: mol_type = other RNA
cttcttggccacgtaacctgag

SEQ ID NO: 21580 - RNA, 22 nt, synthetic construct
  source 1..22: mol_type = other RNA
cttctttccttaaagagtcccc

SEQ ID NO: 21581 - RNA, 22 nt, synthetic construct
  source 1..22: mol_type = other RNA
cttgaaagggaaaggcccattg

SEQ ID NO: 21582 - RNA, 22 nt, synthetic construct
  source 1..22: mol_type = other RNA
cttgacccttggaaggacctgg

SEQ ID NO: 21583 - RNA, 22 nt, synthetic construct
  source 1..22: mol_type = other RNA
cttgattcccggccagtttctc

SEQ ID NO: 21584 - RNA, 22 nt, synthetic construct
  source 1..22: mol_type = other RNA
cttgccaaggactcaaacccag

SEQ ID NO: 21585 - RNA, 22 nt, synthetic construct
  source 1..22: mol_type = other RNA
cttgccccaggccttgtggaca

SEQ ID NO: 21586 - RNA, 22 nt, synthetic construct
  source 1..22: mol_type = other RNA
cttgcccccctcccctatcgcc

SEQ ID NO: 21587 - RNA, 22 nt, synthetic construct
  source 1..22: mol_type = other RNA
cttggaaggacctggctgggtt

SEQ ID NO: 21588 - RNA, 22 nt, synthetic construct
  source 1..22: mol_type = other RNA
cttggcaaactcactcttcggg

SEQ ID NO: 21589 - RNA, 22 nt, synthetic construct
  source 1..22: mol_type = other RNA
cttggcaagcccaggagaggcg

SEQ ID NO: 21590 - RNA, 22 nt, synthetic construct
  source 1..22: mol_type = other RNA
cttggccacgtaacctgagaag

SEQ ID NO: 21591 - RNA, 22 nt, synthetic construct
  source 1..22: mol_type = other RNA
cttggccctcgtagctccctcc

SEQ ID NO: 21592 - RNA, 22 nt, synthetic construct
  source 1..22: mol_type = other RNA
cttggcctggaccccacgagag

SEQ ID NO: 21593 - RNA, 22 nt, synthetic construct
  source 1..22: mol_type = other RNA
cttgggaacagccacagcaggg

SEQ ID NO: 21594 - RNA, 22 nt, synthetic construct
  source 1..22: mol_type = other RNA
cttgggaagtgtaaggaagctg

SEQ ID NO: 21595 - RNA, 22 nt, synthetic construct
  source 1..22: mol_type = other RNA
cttggggacctgcctggagaag

SEQ ID NO: 21596 - RNA, 22 nt, synthetic construct
  source 1..22: mol_type = other RNA
cttggggggacaaaagccgaag

SEQ ID NO: 21597 - RNA, 22 nt, synthetic construct
  source 1..22: mol_type = other RNA
cttggggggtaatttatcccgt

SEQ ID NO: 21598 - RNA, 22 nt, synthetic construct
  source 1..22: mol_type = other RNA
cttggtgaggctggtaccctgc

SEQ ID NO: 21599 - RNA, 22 nt, synthetic construct
  source 1..22: mol_type = other RNA
cttgtggacactgggtgggctc

SEQ ID NO: 21600 - RNA, 22 nt, synthetic construct
  source 1..22: mol_type = other RNA
ctttaaggaaagaaggatggag

SEQ ID NO: 21601 - RNA, 22 nt, synthetic construct
  source 1..22: mol_type = other RNA
ctttcaaggacctgcccagtac

SEQ ID NO: 21602 - RNA, 22 nt, synthetic construct
  source 1..22: mol_type = other RNA
ctttcacagggatgcctgtact

SEQ ID NO: 21603 - RNA, 22 nt, synthetic construct
  source 1..22: mol_type = other RNA
ctttccctttcaaggacctgcc

SEQ ID NO: 21604 - RNA, 22 nt, synthetic construct
  source 1..22: mol_type = other RNA
ctttccttaaagagtccccagt

SEQ ID NO: 21605 - RNA, 22 nt, synthetic construct
  source 1..22: mol_type = other RNA
ctttcgtggtttccactgagca

SEQ ID NO: 21606 - RNA, 22 nt, synthetic construct
  source 1..22: mol_type = other RNA
ctttctagtccccaatttatat

SEQ ID NO: 21607 - RNA, 22 nt, synthetic construct
  source 1..22: mol_type = other RNA
ctttctccatccttctttcctt

SEQ ID NO: 21608 - RNA, 22 nt, synthetic construct
  source 1..22: mol_type = other RNA
ctttctctttctccatccttct

SEQ ID NO: 21609 - RNA, 22 nt, synthetic construct
  source 1..22: mol_type = other RNA
ctttggagaggtgagggacttg

SEQ ID NO: 21610 - RNA, 22 nt, synthetic construct
  source 1..22: mol_type = other RNA
ctttggctcttcacctttctag

SEQ ID NO: 21611 - RNA, 22 nt, synthetic construct
  source 1..22: mol_type = other RNA
ctttgtgagaatggtgcgtcct

SEQ ID NO: 21612 - RNA, 22 nt, synthetic construct
  source 1..22: mol_type = other RNA
cttttgggtggattctcctcca

SEQ ID NO: 21613 - RNA, 22 nt, synthetic construct
  source 1..22: mol_type = other RNA
cttttgtccccccaagttttgg

SEQ ID NO: 21614 - RNA, 22 nt, synthetic construct
  source 1..22: mol_type = other RNA
gaaaaacaaaatcagaataagt

SEQ ID NO: 21615 - RNA, 22 nt, synthetic construct
  source 1..22: mol_type = other RNA
gaaaacagatccagggacacgg

SEQ ID NO: 21616 - RNA, 22 nt, synthetic construct
  source 1..22: mol_type = other RNA
gaaaacagggatggttggtcac

SEQ ID NO: 21617 - RNA, 22 nt, synthetic construct
  source 1..22: mol_type = other RNA
gaaaactccctttgtgagaatg

SEQ ID NO: 21618 - RNA, 22 nt, synthetic construct
  source 1..22: mol_type = other RNA
gaaaatgacccaacagcctctg

SEQ ID NO: 21619 - RNA, 22 nt, synthetic construct
  source 1..22: mol_type = other RNA
gaaacacagccccaggtggaga

SEQ ID NO: 21620 - RNA, 22 nt, synthetic construct
  source 1..22: mol_type = other RNA
gaaaccaccccagcagatactc

SEQ ID NO: 21621 - RNA, 22 nt, synthetic construct
  source 1..22: mol_type = other RNA
gaaaccacgaaaggactcctgg

SEQ ID NO: 21622 - RNA, 22 nt, synthetic construct
  source 1..22: mol_type = other RNA
gaaaccctcagtcctaggaaaa

SEQ ID NO: 21623 - RNA, 22 nt, synthetic construct
  source 1..22: mol_type = other RNA
gaaacgcaccagacggccgcgt

SEQ ID NO: 21624 - RNA, 22 nt, synthetic construct
  source 1..22: mol_type = other RNA
gaaacggtggcccgtgtcagcc

SEQ ID NO: 21625 - RNA, 22 nt, synthetic construct
  source 1..22: mol_type = other RNA
gaaactcgggctgtgaaggggc

SEQ ID NO: 21626 - RNA, 22 nt, synthetic construct
  source 1..22: mol_type = other RNA
gaaactggccgggaatcaagag

SEQ ID NO: 21627 - RNA, 22 nt, synthetic construct
  source 1..22: mol_type = other RNA
gaaagaaggatggagaaagaga

SEQ ID NO: 21628 - RNA, 22 nt, synthetic construct
  source 1..22: mol_type = other RNA
gaaagagaaagggagtagaggc

SEQ ID NO: 21629 - RNA, 22 nt, synthetic construct
  source 1..22: mol_type = other RNA
gaaagatgcctgaggcctgggc

SEQ ID NO: 21630 - RNA, 22 nt, synthetic construct
  source 1..22: mol_type = other RNA
gaaaggactcctggctatctgc

SEQ ID NO: 21631 - RNA, 22 nt, synthetic construct
  source 1..22: mol_type = other RNA
gaaaggcccattgctctccttg

SEQ ID NO: 21632 - RNA, 22 nt, synthetic construct
  source 1..22: mol_type = other RNA
gaaagggaaaggcccattgctc

SEQ ID NO: 21633 - RNA, 22 nt, synthetic construct
  source 1..22: mol_type = other RNA
gaaagggagtagaggcggccac

SEQ ID NO: 21634 - RNA, 22 nt, synthetic construct
  source 1..22: mol_type = other RNA
gaaaggtgaagagccaaagtta

SEQ ID NO: 21635 - RNA, 22 nt, synthetic construct
  source 1..22: mol_type = other RNA
gaaataaacgagccgagttcat

SEQ ID NO: 21636 - RNA, 22 nt, synthetic construct
  source 1..22: mol_type = other RNA
gaacaatataaattggggacta

SEQ ID NO: 21637 - RNA, 22 nt, synthetic construct
  source 1..22: mol_type = other RNA
gaacacctaggacgcaccattc

SEQ ID NO: 21638 - RNA, 22 nt, synthetic construct
  source 1..22: mol_type = other RNA
gaacagagaagagctgggggcc

SEQ ID NO: 21639 - RNA, 22 nt, synthetic construct
  source 1..22: mol_type = other RNA
gaacagccacagcaggggggcg

SEQ ID NO: 21640 - RNA, 22 nt, synthetic construct
  source 1..22: mol_type = other RNA
gaaccccacatggtacctgtta

SEQ ID NO: 21641 - RNA, 22 nt, synthetic construct
  source 1..22: mol_type = other RNA
gaaccccagcccaccccaatgc

SEQ ID NO: 21642 - RNA, 22 nt, synthetic construct
  source 1..22: mol_type = other RNA
gaacccctgtagggaaggggca

SEQ ID NO: 21643 - RNA, 22 nt, synthetic construct
  source 1..22: mol_type = other RNA
gaacctcttccctagtctgagc

SEQ ID NO: 21644 - RNA, 22 nt, synthetic construct
  source 1..22: mol_type = other RNA
gaacctgagctgctctgacgcg

SEQ ID NO: 21645 - RNA, 22 nt, synthetic construct
  source 1..22: mol_type = other RNA
gaacgaagccgtgggcccaggg

SEQ ID NO: 21646 - RNA, 22 nt, synthetic construct
  source 1..22: mol_type = other RNA
gaacgggatgaactcggctcgt

SEQ ID NO: 21647 - RNA, 22 nt, synthetic construct
  source 1..22: mol_type = other RNA
gaacggggaagggagggggctt

SEQ ID NO: 21648 - RNA, 22 nt, synthetic construct
  source 1..22: mol_type = other RNA
gaacggggatgcaggggaacgg

SEQ ID NO: 21649 - RNA, 22 nt, synthetic construct
  source 1..22: mol_type = other RNA
gaacggggctcagtctgaagag

SEQ ID NO: 21650 - RNA, 22 nt, synthetic construct
  source 1..22: mol_type = other RNA
gaactcaggaccaacttattct

SEQ ID NO: 21651 - RNA, 22 nt, synthetic construct
  source 1..22: mol_type = other RNA
gaactcggctcgtttatttcca

SEQ ID NO: 21652 - RNA, 22 nt, synthetic construct
  source 1..22: mol_type = other RNA
gaactggagctgaggaaggagt

SEQ ID NO: 21653 - RNA, 22 nt, synthetic construct
  source 1..22: mol_type = other RNA
gaactggagtgtgacagcctgg

SEQ ID NO: 21654 - RNA, 22 nt, synthetic construct
  source 1..22: mol_type = other RNA
gaacttgggaacagccacagca

SEQ ID NO: 21655 - RNA, 22 nt, synthetic construct
  source 1..22: mol_type = other RNA
gaagaatgagaaacggtggccc

SEQ ID NO: 21656 - RNA, 22 nt, synthetic construct
  source 1..22: mol_type = other RNA
gaagagcagagccaggaacccc

SEQ ID NO: 21657 - RNA, 22 nt, synthetic construct
  source 1..22: mol_type = other RNA
gaagagccaaagttagaactca

SEQ ID NO: 21658 - RNA, 22 nt, synthetic construct
  source 1..22: mol_type = other RNA
gaagagctgggggcctgggctc

SEQ ID NO: 21659 - RNA, 22 nt, synthetic construct
  source 1..22: mol_type = other RNA
gaagaggttccagcccctcctc

SEQ ID NO: 21660 - RNA, 22 nt, synthetic construct
  source 1..22: mol_type = other RNA
gaagagtgagtttgccaagcag

SEQ ID NO: 21661 - RNA, 22 nt, synthetic construct
  source 1..22: mol_type = other RNA
gaagcaggggagctgggtttgg

SEQ ID NO: 21662 - RNA, 22 nt, synthetic construct
  source 1..22: mol_type = other RNA
gaagcagtttggaaaaacaaaa

SEQ ID NO: 21663 - RNA, 22 nt, synthetic construct
  source 1..22: mol_type = other RNA
gaagcccagagcagggccttag

SEQ ID NO: 21664 - RNA, 22 nt, synthetic construct
  source 1..22: mol_type = other RNA
gaagccccctcccttccccgtt

SEQ ID NO: 21665 - RNA, 22 nt, synthetic construct
  source 1..22: mol_type = other RNA
gaagccgtgggcccagggctat

SEQ ID NO: 21666 - RNA, 22 nt, synthetic construct
  source 1..22: mol_type = other RNA
gaagcctgagcgcctctcctgg

SEQ ID NO: 21667 - RNA, 22 nt, synthetic construct
  source 1..22: mol_type = other RNA
gaagcgccacctgtgggtggtg

SEQ ID NO: 21668 - RNA, 22 nt, synthetic construct
  source 1..22: mol_type = other RNA
gaagcgggaccctgctctgggc

SEQ ID NO: 21669 - RNA, 22 nt, synthetic construct
  source 1..22: mol_type = other RNA
gaagctaaactcctagatccac

SEQ ID NO: 21670 - RNA, 22 nt, synthetic construct
  source 1..22: mol_type = other RNA
gaagctgcagcaccaggatcag

SEQ ID NO: 21671 - RNA, 22 nt, synthetic construct
  source 1..22: mol_type = other RNA
gaaggacctggctgggtttaag

SEQ ID NO: 21672 - RNA, 22 nt, synthetic construct
  source 1..22: mol_type = other RNA
gaaggaggaggggctggaacct

SEQ ID NO: 21673 - RNA, 22 nt, synthetic construct
  source 1..22: mol_type = other RNA
gaaggagtccaggcccccagcc

SEQ ID NO: 21674 - RNA, 22 nt, synthetic construct
  source 1..22: mol_type = other RNA
gaaggagtgaagctaaactcct

SEQ ID NO: 21675 - RNA, 22 nt, synthetic construct
  source 1..22: mol_type = other RNA
gaaggatgcaggacgagaaaca

SEQ ID NO: 21676 - RNA, 22 nt, synthetic construct
  source 1..22: mol_type = other RNA
gaaggatggagaaagagaaagg

SEQ ID NO: 21677 - RNA, 22 nt, synthetic construct
  source 1..22: mol_type = other RNA
gaaggccaccctgtgctgggac

SEQ ID NO: 21678 - RNA, 22 nt, synthetic construct
  source 1..22: mol_type = other RNA
gaaggcctggccggcctgacca

SEQ ID NO: 21679 - RNA, 22 nt, synthetic construct
  source 1..22: mol_type = other RNA
gaagggaatccctcctctctga

SEQ ID NO: 21680 - RNA, 22 nt, synthetic construct
  source 1..22: mol_type = other RNA
gaagggagggggcttctcatct

SEQ ID NO: 21681 - RNA, 22 nt, synthetic construct
  source 1..22: mol_type = other RNA
gaagggctggggcctggcctcc

SEQ ID NO: 21682 - RNA, 22 nt, synthetic construct
  source 1..22: mol_type = other RNA
gaaggggcaggagagccagggg

SEQ ID NO: 21683 - RNA, 22 nt, synthetic construct
  source 1..22: mol_type = other RNA
gaaggggccgcacgtgccctgg

SEQ ID NO: 21684 - RNA, 22 nt, synthetic construct
  source 1..22: mol_type = other RNA
gaagggggacagggaagcctga

SEQ ID NO: 21685 - RNA, 22 nt, synthetic construct
  source 1..22: mol_type = other RNA
gaagggggatgcaggggaacgg

SEQ ID NO: 21686 - RNA, 22 nt, synthetic construct
  source 1..22: mol_type = other RNA
gaagtccagggggtcggaggag

SEQ ID NO: 21687 - RNA, 22 nt, synthetic construct
  source 1..22: mol_type = other RNA
gaagtgaacggggaagggaggg

SEQ ID NO: 21688 - RNA, 22 nt, synthetic construct
  source 1..22: mol_type = other RNA
gaagtgtaaggaagctgcagca

SEQ ID NO: 21689 - RNA, 22 nt, synthetic construct
  source 1..22: mol_type = other RNA
gaataagttggtcctgagttct

SEQ ID NO: 21690 - RNA, 22 nt, synthetic construct
  source 1..22: mol_type = other RNA
gaatatgtcccagatagcactg

SEQ ID NO: 21691 - RNA, 22 nt, synthetic construct
  source 1..22: mol_type = other RNA
gaatcaagagtcacccagagac

SEQ ID NO: 21692 - RNA, 22 nt, synthetic construct
  source 1..22: mol_type = other RNA
gaatccacccaaaaggcagcct

SEQ ID NO: 21693 - RNA, 22 nt, synthetic construct
  source 1..22: mol_type = other RNA
gaatccctcctctctgaacccc

SEQ ID NO: 21694 - RNA, 22 nt, synthetic construct
  source 1..22: mol_type = other RNA
gaatcctggctccagcccctcc

SEQ ID NO: 21695 - RNA, 22 nt, synthetic construct
  source 1..22: mol_type = other RNA
gaatgagaaacggtggcccgtg

SEQ ID NO: 21696 - RNA, 22 nt, synthetic construct
  source 1..22: mol_type = other RNA
gaatggggagaggctgggggcc

SEQ ID NO: 21697 - RNA, 22 nt, synthetic construct
  source 1..22: mol_type = other RNA
gaatggggaggggttgggcctg

SEQ ID NO: 21698 - RNA, 22 nt, synthetic construct
  source 1..22: mol_type = other RNA
gaatgggggcagggtaccagcc

SEQ ID NO: 21699 - RNA, 22 nt, synthetic construct
  source 1..22: mol_type = other RNA
gaatggtgcgtcctaggtgttc

SEQ ID NO: 21700 - RNA, 22 nt, synthetic construct
  source 1..22: mol_type = other RNA
gacaaaagccgaagtccagggg

SEQ ID NO: 21701 - RNA, 22 nt, synthetic construct
  source 1..22: mol_type = other RNA
gacaactgggtggaaataaacg

SEQ ID NO: 21702 - RNA, 22 nt, synthetic construct
  source 1..22: mol_type = other RNA
gacacccccctcctcaccacag

SEQ ID NO: 21703 - RNA, 22 nt, synthetic construct
  source 1..22: mol_type = other RNA
gacacggcaaaacccccgtcac

SEQ ID NO: 21704 - RNA, 22 nt, synthetic construct
  source 1..22: mol_type = other RNA
gacacgggccaccgtttctcat

SEQ ID NO: 21705 - RNA, 22 nt, synthetic construct
  source 1..22: mol_type = other RNA
gacacggtgctaggacagtggg

SEQ ID NO: 21706 - RNA, 22 nt, synthetic construct
  source 1..22: mol_type = other RNA
gacactgggtgggctccgggac

SEQ ID NO: 21707 - RNA, 22 nt, synthetic construct
  source 1..22: mol_type = other RNA
gacagactcaggggcctgggcg

SEQ ID NO: 21708 - RNA, 22 nt, synthetic construct
  source 1..22: mol_type = other RNA
gacagcctagttttagcactga

SEQ ID NO: 21709 - RNA, 22 nt, synthetic construct
  source 1..22: mol_type = other RNA
gacagcctggggcccaggcaca

SEQ ID NO: 21710 - RNA, 22 nt, synthetic construct
  source 1..22: mol_type = other RNA
gacagctgcacacctgtgtgcc

SEQ ID NO: 21711 - RNA, 22 nt, synthetic construct
  source 1..22: mol_type = other RNA
gacagggaagcctgagcgcctc

SEQ ID NO: 21712 - RNA, 22 nt, synthetic construct
  source 1..22: mol_type = other RNA
gacagggctggggtggcctctc

SEQ ID NO: 21713 - RNA, 22 nt, synthetic construct
  source 1..22: mol_type = other RNA
gacagtgaccaaccatccctgt

SEQ ID NO: 21714 - RNA, 22 nt, synthetic construct
  source 1..22: mol_type = other RNA
gacagtggggaaaatgacccaa

SEQ ID NO: 21715 - RNA, 22 nt, synthetic construct
  source 1..22: mol_type = other RNA
gacatattcctccgcccagagc

SEQ ID NO: 21716 - RNA, 22 nt, synthetic construct
  source 1..22: mol_type = other RNA
gaccaaccatccctgttttcct

SEQ ID NO: 21717 - RNA, 22 nt, synthetic construct
  source 1..22: mol_type = other RNA
gaccaacttattctgattttgt

SEQ ID NO: 21718 - RNA, 22 nt, synthetic construct
  source 1..22: mol_type = other RNA
gaccactgggcaaccaggcgta

SEQ ID NO: 21719 - RNA, 22 nt, synthetic construct
  source 1..22: mol_type = other RNA
gaccagcttatgctgtttgccc

SEQ ID NO: 21720 - RNA, 22 nt, synthetic construct
  source 1..22: mol_type = other RNA
gacccaaacccagctcccctgc

SEQ ID NO: 21721 - RNA, 22 nt, synthetic construct
  source 1..22: mol_type = other RNA
gacccaacagcctctggccact

SEQ ID NO: 21722 - RNA, 22 nt, synthetic construct
  source 1..22: mol_type = other RNA
gacccacgagtccaggccccag

SEQ ID NO: 21723 - RNA, 22 nt, synthetic construct
  source 1..22: mol_type = other RNA
gacccaggggtccaggcccagc

SEQ ID NO: 21724 - RNA, 22 nt, synthetic construct
  source 1..22: mol_type = other RNA
gaccccacgagaggccacccca

SEQ ID NO: 21725 - RNA, 22 nt, synthetic construct
  source 1..22: mol_type = other RNA
gaccccctggacttcggctttt

SEQ ID NO: 21726 - RNA, 22 nt, synthetic construct
  source 1..22: mol_type = other RNA
gacccctaagggaagaatgaga

SEQ ID NO: 21727 - RNA, 22 nt, synthetic construct
  source 1..22: mol_type = other RNA
gacccctgggtctgaatgggga

SEQ ID NO: 21728 - RNA, 22 nt, synthetic construct
  source 1..22: mol_type = other RNA
gaccctgctctgggcggaggaa

SEQ ID NO: 21729 - RNA, 22 nt, synthetic construct
  source 1..22: mol_type = other RNA
gacccttggaaggacctggctg

SEQ ID NO: 21730 - RNA, 22 nt, synthetic construct
  source 1..22: mol_type = other RNA
gacctcatgctcttggccctcg

SEQ ID NO: 21731 - RNA, 22 nt, synthetic construct
  source 1..22: mol_type = other RNA
gacctgaactggagctgaggaa

SEQ ID NO: 21732 - RNA, 22 nt, synthetic construct
  source 1..22: mol_type = other RNA
gacctgacccaaacccagctcc

SEQ ID NO: 21733 - RNA, 22 nt, synthetic construct
  source 1..22: mol_type = other RNA
gacctgcccagtacaggcatcc

SEQ ID NO: 21734 - RNA, 22 nt, synthetic construct
  source 1..22: mol_type = other RNA
gacctgcccggttctcagtggc

SEQ ID NO: 21735 - RNA, 22 nt, synthetic construct
  source 1..22: mol_type = other RNA
gacctgcctggagaaggatgca

SEQ ID NO: 21736 - RNA, 22 nt, synthetic construct
  source 1..22: mol_type = other RNA
gacctggctgggtttaaggcag

SEQ ID NO: 21737 - RNA, 22 nt, synthetic construct
  source 1..22: mol_type = other RNA
gacctggtgaacacctaggacg

SEQ ID NO: 21738 - RNA, 22 nt, synthetic construct
  source 1..22: mol_type = other RNA
gacgagaaacacagccccaggt

SEQ ID NO: 21739 - RNA, 22 nt, synthetic construct
  source 1..22: mol_type = other RNA
gacgaggaagggggacagggaa

SEQ ID NO: 21740 - RNA, 22 nt, synthetic construct
  source 1..22: mol_type = other RNA
gacgcaccattctcacaaaggg

SEQ ID NO: 21741 - RNA, 22 nt, synthetic construct
  source 1..22: mol_type = other RNA
gacgcacggaggaacaatataa

SEQ ID NO: 21742 - RNA, 22 nt, synthetic construct
  source 1..22: mol_type = other RNA
gacgcggccgtctggtgcgttt

SEQ ID NO: 21743 - RNA, 22 nt, synthetic construct
  source 1..22: mol_type = other RNA
gacggccgcgtcagagcagctc

SEQ ID NO: 21744 - RNA, 22 nt, synthetic construct
  source 1..22: mol_type = other RNA
gacggggctggctactggcctt

SEQ ID NO: 21745 - RNA, 22 nt, synthetic construct
  source 1..22: mol_type = other RNA
gacgggggttttgccgtgtcta

SEQ ID NO: 21746 - RNA, 22 nt, synthetic construct
  source 1..22: mol_type = other RNA
gactagaaaggtgaagagccaa

SEQ ID NO: 21747 - RNA, 22 nt, synthetic construct
  source 1..22: mol_type = other RNA
gactagggaagaggttccagcc

SEQ ID NO: 21748 - RNA, 22 nt, synthetic construct
  source 1..22: mol_type = other RNA
gactcaaacccagaagcccaga

SEQ ID NO: 21749 - RNA, 22 nt, synthetic construct
  source 1..22: mol_type = other RNA
gactcaggggcctgggcgggac

SEQ ID NO: 21750 - RNA, 22 nt, synthetic construct
  source 1..22: mol_type = other RNA
gactccagagggagccacgaaa

SEQ ID NO: 21751 - RNA, 22 nt, synthetic construct
  source 1..22: mol_type = other RNA
gactccagagtccaggcccaac

SEQ ID NO: 21752 - RNA, 22 nt, synthetic construct
  source 1..22: mol_type = other RNA
gactcccagaggggtgagacag

SEQ ID NO: 21753 - RNA, 22 nt, synthetic construct
  source 1..22: mol_type = other RNA
gactcctggctatctgcaaaca

SEQ ID NO: 21754 - RNA, 22 nt, synthetic construct
  source 1..22: mol_type = other RNA
gactcctggctctgaaggagga

SEQ ID NO: 21755 - RNA, 22 nt, synthetic construct
  source 1..22: mol_type = other RNA
gactcctgggtctgagggtgga

SEQ ID NO: 21756 - RNA, 22 nt, synthetic construct
  source 1..22: mol_type = other RNA
gactccttcatctgagggcgga

SEQ ID NO: 21757 - RNA, 22 nt, synthetic construct
  source 1..22: mol_type = other RNA
gactcgtgggtctgagggagga

SEQ ID NO: 21758 - RNA, 22 nt, synthetic construct
  source 1..22: mol_type = other RNA
gactctggagtccctggtgccc

SEQ ID NO: 21759 - RNA, 22 nt, synthetic construct
  source 1..22: mol_type = other RNA
gactcttgattcccggccagtt

SEQ ID NO: 21760 - RNA, 22 nt, synthetic construct
  source 1..22: mol_type = other RNA
gactctttaaggaaagaaggat

SEQ ID NO: 21761 - RNA, 22 nt, synthetic construct
  source 1..22: mol_type = other RNA
gactgagccccgttcccctgca

SEQ ID NO: 21762 - RNA, 22 nt, synthetic construct
  source 1..22: mol_type = other RNA
gactgagggtttcagtgctaaa

SEQ ID NO: 21763 - RNA, 22 nt, synthetic construct
  source 1..22: mol_type = other RNA
gactgcttggcaaactcactct

SEQ ID NO: 21764 - RNA, 22 nt, synthetic construct
  source 1..22: mol_type = other RNA
gactgggggcctggactcctgg

SEQ ID NO: 21765 - RNA, 22 nt, synthetic construct
  source 1..22: mol_type = other RNA
gacttcggcttttgtcccccca

SEQ ID NO: 21766 - RNA, 22 nt, synthetic construct
  source 1..22: mol_type = other RNA
gacttctgggtcttagggaggc

SEQ ID NO: 21767 - RNA, 22 nt, synthetic construct
  source 1..22: mol_type = other RNA
gacttgccccaggccttgtgga

SEQ ID NO: 21768 - RNA, 22 nt, synthetic construct
  source 1..22: mol_type = other RNA
gacttggggggtaatttatccc

SEQ ID NO: 21769 - RNA, 22 nt, synthetic construct
  source 1..22: mol_type = other RNA
gagaaacacagccccaggtgga

SEQ ID NO: 21770 - RNA, 22 nt, synthetic construct
  source 1..22: mol_type = other RNA
gagaaacggtggcccgtgtcag

SEQ ID NO: 21771 - RNA, 22 nt, synthetic construct
  source 1..22: mol_type = other RNA
gagaaactggccgggaatcaag

SEQ ID NO: 21772 - RNA, 22 nt, synthetic construct
  source 1..22: mol_type = other RNA
gagaaagagaaagggagtagag

SEQ ID NO: 21773 - RNA, 22 nt, synthetic construct
  source 1..22: mol_type = other RNA
gagaaagggagtagaggcggcc

SEQ ID NO: 21774 - RNA, 22 nt, synthetic construct
  source 1..22: mol_type = other RNA
gagaagagctgggggcctgggc

SEQ ID NO: 21775 - RNA, 22 nt, synthetic construct
  source 1..22: mol_type = other RNA
gagaagcagtttggaaaaacaa

SEQ ID NO: 21776 - RNA, 22 nt, synthetic construct
  source 1..22: mol_type = other RNA
gagaagccccctcccttccccg

SEQ ID NO: 21777 - RNA, 22 nt, synthetic construct
  source 1..22: mol_type = other RNA
gagaaggatgcaggacgagaaa

SEQ ID NO: 21778 - RNA, 22 nt, synthetic construct
  source 1..22: mol_type = other RNA
gagaagggaatccctcctctct

SEQ ID NO: 21779 - RNA, 22 nt, synthetic construct
  source 1..22: mol_type = other RNA
gagaatccacccaaaaggcagc

SEQ ID NO: 21780 - RNA, 22 nt, synthetic construct
  source 1..22: mol_type = other RNA
gagaatggtgcgtcctaggtgt

SEQ ID NO: 21781 - RNA, 22 nt, synthetic construct
  source 1..22: mol_type = other RNA
gagacagctgcacacctgtgtg

SEQ ID NO: 21782 - RNA, 22 nt, synthetic construct
  source 1..22: mol_type = other RNA
gagacagtgaccaaccatccct

SEQ ID NO: 21783 - RNA, 22 nt, synthetic construct
  source 1..22: mol_type = other RNA
gagagcaatgggcctttccctt

SEQ ID NO: 21784 - RNA, 22 nt, synthetic construct
  source 1..22: mol_type = other RNA
gagagccaggggcatgagatgg

SEQ ID NO: 21785 - RNA, 22 nt, synthetic construct
  source 1..22: mol_type = other RNA
gagaggagggattcccttctca

SEQ ID NO: 21786 - RNA, 22 nt, synthetic construct
  source 1..22: mol_type = other RNA
gagaggccaccccagccctgtc

SEQ ID NO: 21787 - RNA, 22 nt, synthetic construct
  source 1..22: mol_type = other RNA
gagaggcgctcaggcttccctg

SEQ ID NO: 21788 - RNA, 22 nt, synthetic construct
  source 1..22: mol_type = other RNA
gagaggctgggggcctggactc

SEQ ID NO: 21789 - RNA, 22 nt, synthetic construct
  source 1..22: mol_type = other RNA
gagagggtagcgcagggtggcc

SEQ ID NO: 21790 - RNA, 22 nt, synthetic construct
  source 1..22: mol_type = other RNA
gagaggtgagggacttgggggg

SEQ ID NO: 21791 - RNA, 22 nt, synthetic construct
  source 1..22: mol_type = other RNA
gagataaggccagtagccagcc

SEQ ID NO: 21792 - RNA, 22 nt, synthetic construct
  source 1..22: mol_type = other RNA
gagatggtggacgaggaagggg

SEQ ID NO: 21793 - RNA, 22 nt, synthetic construct
  source 1..22: mol_type = other RNA
gagcaatgggcctttccctttc

SEQ ID NO: 21794 - RNA, 22 nt, synthetic construct
  source 1..22: mol_type = other RNA
gagcactgaaggcctggccggc

SEQ ID NO: 21795 - RNA, 22 nt, synthetic construct
  source 1..22: mol_type = other RNA
gagcactggaagcgccacctgt

SEQ ID NO: 21796 - RNA, 22 nt, synthetic construct
  source 1..22: mol_type = other RNA
gagcagagccaggaacccctgt

SEQ ID NO: 21797 - RNA, 22 nt, synthetic construct
  source 1..22: mol_type = other RNA
gagcagctcaggttctgggaga

SEQ ID NO: 21798 - RNA, 22 nt, synthetic construct
  source 1..22: mol_type = other RNA
gagcagggccttagggaagcgg

SEQ ID NO: 21799 - RNA, 22 nt, synthetic construct
  source 1..22: mol_type = other RNA
gagcagggtcccgcttccctaa

SEQ ID NO: 21800 - RNA, 22 nt, synthetic construct
  source 1..22: mol_type = other RNA
gagcatgaggtcatggaaactc

SEQ ID NO: 21801 - RNA, 22 nt, synthetic construct
  source 1..22: mol_type = other RNA
gagcattggggtgggctggggt

SEQ ID NO: 21802 - RNA, 22 nt, synthetic construct
  source 1..22: mol_type = other RNA
gagccaaagttagaactcagga

SEQ ID NO: 21803 - RNA, 22 nt, synthetic construct
  source 1..22: mol_type = other RNA
gagccacgaaaacagatccagg

SEQ ID NO: 21804 - RNA, 22 nt, synthetic construct
  source 1..22: mol_type = other RNA
gagccaggaacccctgtaggga

SEQ ID NO: 21805 - RNA, 22 nt, synthetic construct
  source 1..22: mol_type = other RNA
gagccaggagtcctggccccca

SEQ ID NO: 21806 - RNA, 22 nt, synthetic construct
  source 1..22: mol_type = other RNA
gagccaggattcttagggctga

SEQ ID NO: 21807 - RNA, 22 nt, synthetic construct
  source 1..22: mol_type = other RNA
gagccaggggcatgagatggtg

SEQ ID NO: 21808 - RNA, 22 nt, synthetic construct
  source 1..22: mol_type = other RNA
gagcccacccagtgtccacaag

SEQ ID NO: 21809 - RNA, 22 nt, synthetic construct
  source 1..22: mol_type = other RNA
gagcccaggcccccagctcttc

SEQ ID NO: 21810 - RNA, 22 nt, synthetic construct
  source 1..22: mol_type = other RNA
gagccccgttcccctgcatccc

SEQ ID NO: 21811 - RNA, 22 nt, synthetic construct
  source 1..22: mol_type = other RNA
gagccgagttcatcccgttccc

SEQ ID NO: 21812 - RNA, 22 nt, synthetic construct
  source 1..22: mol_type = other RNA
gagcgcctctcctgggcttgcc

SEQ ID NO: 21813 - RNA, 22 nt, synthetic construct
  source 1..22: mol_type = other RNA
gagctacgagggccaagagcat

SEQ ID NO: 21814 - RNA, 22 nt, synthetic construct
  source 1..22: mol_type = other RNA
gagctgaggaaggagtgaagct

SEQ ID NO: 21815 - RNA, 22 nt, synthetic construct
  source 1..22: mol_type = other RNA
gagctgctctgacgcggccgtc

SEQ ID NO: 21816 - RNA, 22 nt, synthetic construct
  source 1..22: mol_type = other RNA
gagctgggggcctgggctcctg

SEQ ID NO: 21817 - RNA, 22 nt, synthetic construct
  source 1..22: mol_type = other RNA
gagctgggtttgggtcaggtct

SEQ ID NO: 21818 - RNA, 22 nt, synthetic construct
  source 1..22: mol_type = other RNA
gagcttgacccttggaaggacc

SEQ ID NO: 21819 - RNA, 22 nt, synthetic construct
  source 1..22: mol_type = other RNA
gaggaacaatataaattgggga

SEQ ID NO: 21820 - RNA, 22 nt, synthetic construct
  source 1..22: mol_type = other RNA
gaggaaggagtgaagctaaact

SEQ ID NO: 21821 - RNA, 22 nt, synthetic construct
  source 1..22: mol_type = other RNA
gaggaaggccaccctgtgctgg

SEQ ID NO: 21822 - RNA, 22 nt, synthetic construct
  source 1..22: mol_type = other RNA
gaggaagggggacagggaagcc

SEQ ID NO: 21823 - RNA, 22 nt, synthetic construct
  source 1..22: mol_type = other RNA
gaggaatatgtcccagatagca

SEQ ID NO: 21824 - RNA, 22 nt, synthetic construct
  source 1..22: mol_type = other RNA
gaggagaagcagtttggaaaaa

SEQ ID NO: 21825 - RNA, 22 nt, synthetic construct
  source 1..22: mol_type = other RNA
gaggagaatccacccaaaaggc

SEQ ID NO: 21826 - RNA, 22 nt, synthetic construct
  source 1..22: mol_type = other RNA
gaggaggcgggagggagctacg

SEQ ID NO: 21827 - RNA, 22 nt, synthetic construct
  source 1..22: mol_type = other RNA
gaggagggacttgccccaggcc

SEQ ID NO: 21828 - RNA, 22 nt, synthetic construct
  source 1..22: mol_type = other RNA
gaggagggattcccttctcagg

SEQ ID NO: 21829 - RNA, 22 nt, synthetic construct
  source 1..22: mol_type = other RNA
gaggaggggctggaacctcttc

SEQ ID NO: 21830 - RNA, 22 nt, synthetic construct
  source 1..22: mol_type = other RNA
gaggaggggctggggcctggac

SEQ ID NO: 21831 - RNA, 22 nt, synthetic construct
  source 1..22: mol_type = other RNA
gaggaggggggtgtccgtgtgg

SEQ ID NO: 21832 - RNA, 22 nt, synthetic construct
  source 1..22: mol_type = other RNA
gaggccaccccagccctgtcta

SEQ ID NO: 21833 - RNA, 22 nt, synthetic construct
  source 1..22: mol_type = other RNA
gaggccaggccccagcccttcc

SEQ ID NO: 21834 - RNA, 22 nt, synthetic construct
  source 1..22: mol_type = other RNA
gaggccccaggccacctacttg

SEQ ID NO: 21835 - RNA, 22 nt, synthetic construct
  source 1..22: mol_type = other RNA
gaggccccctctgcacggggcc

SEQ ID NO: 21836 - RNA, 22 nt, synthetic construct
  source 1..22: mol_type = other RNA
gaggcctggagcattggggtgg

SEQ ID NO: 21837 - RNA, 22 nt, synthetic construct
  source 1..22: mol_type = other RNA
gaggcctgggcaccagggactc

SEQ ID NO: 21838 - RNA, 22 nt, synthetic construct
  source 1..22: mol_type = other RNA
gaggcgctcaggcttccctgtc

SEQ ID NO: 21839 - RNA, 22 nt, synthetic construct
  source 1..22: mol_type = other RNA
gaggcggccacgacctggtgaa

SEQ ID NO: 21840 - RNA, 22 nt, synthetic construct
  source 1..22: mol_type = other RNA
gaggcgggagggagctacgagg

SEQ ID NO: 21841 - RNA, 22 nt, synthetic construct
  source 1..22: mol_type = other RNA
gaggcggggctgggcctggacc

SEQ ID NO: 21842 - RNA, 22 nt, synthetic construct
  source 1..22: mol_type = other RNA
gaggctgggggcctggactcct

SEQ ID NO: 21843 - RNA, 22 nt, synthetic construct
  source 1..22: mol_type = other RNA
gaggctggtaccctgcccccat

SEQ ID NO: 21844 - RNA, 22 nt, synthetic construct
  source 1..22: mol_type = other RNA
gaggctgttgggtcattttccc

SEQ ID NO: 21845 - RNA, 22 nt, synthetic construct
  source 1..22: mol_type = other RNA
gagggactgggggcctggactc

SEQ ID NO: 21846 - RNA, 22 nt, synthetic construct
  source 1..22: mol_type = other RNA
gagggacttgccccaggccttg

SEQ ID NO: 21847 - RNA, 22 nt, synthetic construct
  source 1..22: mol_type = other RNA
gagggacttggggggtaattta

SEQ ID NO: 21848 - RNA, 22 nt, synthetic construct
  source 1..22: mol_type = other RNA
gagggagccacgaaaacagatc

SEQ ID NO: 21849 - RNA, 22 nt, synthetic construct
  source 1..22: mol_type = other RNA
gagggagctacgagggccaaga

SEQ ID NO: 21850 - RNA, 22 nt, synthetic construct
  source 1..22: mol_type = other RNA
gagggaggaggggctggggcct

SEQ ID NO: 21851 - RNA, 22 nt, synthetic construct
  source 1..22: mol_type = other RNA
gagggattcccttctcaggtta

SEQ ID NO: 21852 - RNA, 22 nt, synthetic construct
  source 1..22: mol_type = other RNA
gagggccaagagcatgaggtca

SEQ ID NO: 21853 - RNA, 22 nt, synthetic construct
  source 1..22: mol_type = other RNA
gagggcggaagggctggggcct

SEQ ID NO: 21854 - RNA, 22 nt, synthetic construct
  source 1..22: mol_type = other RNA
gaggggctggaacctcttccct

SEQ ID NO: 21855 - RNA, 22 nt, synthetic construct
  source 1..22: mol_type = other RNA
gaggggctggagccaggattct

SEQ ID NO: 21856 - RNA, 22 nt, synthetic construct
  source 1..22: mol_type = other RNA
gaggggctggggcctggactcg

SEQ ID NO: 21857 - RNA, 22 nt, synthetic construct
  source 1..22: mol_type = other RNA
gaggggctgggggccaggactc

SEQ ID NO: 21858 - RNA, 22 nt, synthetic construct
  source 1..22: mol_type = other RNA
gagggggcctcagtgaactgga

SEQ ID NO: 21859 - RNA, 22 nt, synthetic construct
  source 1..22: mol_type = other RNA
gagggggcttctcatctgggtg

SEQ ID NO: 21860 - RNA, 22 nt, synthetic construct
  source 1..22: mol_type = other RNA
gaggggggcaaggagagcaatg

SEQ ID NO: 21861 - RNA, 22 nt, synthetic construct
  source 1..22: mol_type = other RNA
gaggggggtgtccgtgtggaaa

SEQ ID NO: 21862 - RNA, 22 nt, synthetic construct
  source 1..22: mol_type = other RNA
gaggggtgagacagctgcacac

SEQ ID NO: 21863 - RNA, 22 nt, synthetic construct
  source 1..22: mol_type = other RNA
gaggggttgggcctggactctg

SEQ ID NO: 21864 - RNA, 22 nt, synthetic construct
  source 1..22: mol_type = other RNA
gagggtagcgcagggtggccac

SEQ ID NO: 21865 - RNA, 22 nt, synthetic construct
  source 1..22: mol_type = other RNA
gagggtggagggactgggggcc

SEQ ID NO: 21866 - RNA, 22 nt, synthetic construct
  source 1..22: mol_type = other RNA
gagggtttcagtgctaaaacta

SEQ ID NO: 21867 - RNA, 22 nt, synthetic construct
  source 1..22: mol_type = other RNA
gaggtcatggaaactcgggctg

SEQ ID NO: 21868 - RNA, 22 nt, synthetic construct
  source 1..22: mol_type = other RNA
gaggtgagggacttggggggta

SEQ ID NO: 21869 - RNA, 22 nt, synthetic construct
  source 1..22: mol_type = other RNA
gaggttccagcccctcctcctt

SEQ ID NO: 21870 - RNA, 22 nt, synthetic construct
  source 1..22: mol_type = other RNA
gagtagaggcggccacgacctg

SEQ ID NO: 21871 - RNA, 22 nt, synthetic construct
  source 1..22: mol_type = other RNA
gagtaggaggggctggagccag

SEQ ID NO: 21872 - RNA, 22 nt, synthetic construct
  source 1..22: mol_type = other RNA
gagtatctgctggggtggtttc

SEQ ID NO: 21873 - RNA, 22 nt, synthetic construct
  source 1..22: mol_type = other RNA
gagtcacccagagacagtgacc

SEQ ID NO: 21874 - RNA, 22 nt, synthetic construct
  source 1..22: mol_type = other RNA
gagtccaggcccaacccctccc

SEQ ID NO: 21875 - RNA, 22 nt, synthetic construct
  source 1..22: mol_type = other RNA
gagtccaggccccagcccctcc

SEQ ID NO: 21876 - RNA, 22 nt, synthetic construct
  source 1..22: mol_type = other RNA
gagtccaggcccccagcctctc

SEQ ID NO: 21877 - RNA, 22 nt, synthetic construct
  source 1..22: mol_type = other RNA
gagtccaggcccccagtccctc

SEQ ID NO: 21878 - RNA, 22 nt, synthetic construct
  source 1..22: mol_type = other RNA
gagtccccagtgctatctggga

SEQ ID NO: 21879 - RNA, 22 nt, synthetic construct
  source 1..22: mol_type = other RNA
gagtcccgacttgctgggacac

SEQ ID NO: 21880 - RNA, 22 nt, synthetic construct
  source 1..22: mol_type = other RNA
gagtcccgcccaggcccctgag

SEQ ID NO: 21881 - RNA, 22 nt, synthetic construct
  source 1..22: mol_type = other RNA
gagtccctggtgcccaggcctc

SEQ ID NO: 21882 - RNA, 22 nt, synthetic construct
  source 1..22: mol_type = other RNA
gagtcctggcccccagcccctc

SEQ ID NO: 21883 - RNA, 22 nt, synthetic construct
  source 1..22: mol_type = other RNA
gagtccttggcaagcccaggag

SEQ ID NO: 21884 - RNA, 22 nt, synthetic construct
  source 1..22: mol_type = other RNA
gagtcctttcgtggtttccact

SEQ ID NO: 21885 - RNA, 22 nt, synthetic construct
  source 1..22: mol_type = other RNA
gagtctgtcccagcacagggtg

SEQ ID NO: 21886 - RNA, 22 nt, synthetic construct
  source 1..22: mol_type = other RNA
gagtgaagctaaactcctagat

SEQ ID NO: 21887 - RNA, 22 nt, synthetic construct
  source 1..22: mol_type = other RNA
gagtgagtttgccaagcagtca

SEQ ID NO: 21888 - RNA, 22 nt, synthetic construct
  source 1..22: mol_type = other RNA
gagtgtgacagcctggggccca

SEQ ID NO: 21889 - RNA, 22 nt, synthetic construct
  source 1..22: mol_type = other RNA
gagttcatcccgttcccagggc

SEQ ID NO: 21890 - RNA, 22 nt, synthetic construct
  source 1..22: mol_type = other RNA
gagttctaactttggctcttca

SEQ ID NO: 21891 - RNA, 22 nt, synthetic construct
  source 1..22: mol_type = other RNA
gagtttagcttcactccttcct

SEQ ID NO: 21892 - RNA, 22 nt, synthetic construct
  source 1..22: mol_type = other RNA
gagtttccatgacctcatgctc

SEQ ID NO: 21893 - RNA, 22 nt, synthetic construct
  source 1..22: mol_type = other RNA
gagtttgccaagcagtcacccc

SEQ ID NO: 21894 - RNA, 22 nt, synthetic construct
  source 1..22: mol_type = other RNA
gagttttccacacggacacccc

SEQ ID NO: 21895 - RNA, 22 nt, synthetic construct
  source 1..22: mol_type = other RNA
gataaacccacgtggggtaccc

SEQ ID NO: 21896 - RNA, 22 nt, synthetic construct
  source 1..22: mol_type = other RNA
gataaattaccccccaagtccc

SEQ ID NO: 21897 - RNA, 22 nt, synthetic construct
  source 1..22: mol_type = other RNA
gataaggccagtagccagcccc

SEQ ID NO: 21898 - RNA, 22 nt, synthetic construct
  source 1..22: mol_type = other RNA
gataccccgaagagtgagtttg

SEQ ID NO: 21899 - RNA, 22 nt, synthetic construct
  source 1..22: mol_type = other RNA
gatacgcctggttgcccagtgg

SEQ ID NO: 21900 - RNA, 22 nt, synthetic construct
  source 1..22: mol_type = other RNA
gatactctgcaggaacgaagcc

SEQ ID NO: 21901 - RNA, 22 nt, synthetic construct
  source 1..22: mol_type = other RNA
gatagcactggggactctttaa

SEQ ID NO: 21902 - RNA, 22 nt, synthetic construct
  source 1..22: mol_type = other RNA
gatagccaggagtcctttcgtg

SEQ ID NO: 21903 - RNA, 22 nt, synthetic construct
  source 1..22: mol_type = other RNA
gataggggaggggggcaaggag

SEQ ID NO: 21904 - RNA, 22 nt, synthetic construct
  source 1..22: mol_type = other RNA
gatcagtgaaacgcaccagacg

SEQ ID NO: 21905 - RNA, 22 nt, synthetic construct
  source 1..22: mol_type = other RNA
gatccacgggataaattacccc

SEQ ID NO: 21906 - RNA, 22 nt, synthetic construct
  source 1..22: mol_type = other RNA
gatccagggacacggtgctagg

SEQ ID NO: 21907 - RNA, 22 nt, synthetic construct
  source 1..22: mol_type = other RNA
gatcctggtgctgcagcttcct

SEQ ID NO: 21908 - RNA, 22 nt, synthetic construct
  source 1..22: mol_type = other RNA
gatctaggagtttagcttcact

SEQ ID NO: 21909 - RNA, 22 nt, synthetic construct
  source 1..22: mol_type = other RNA
gatctgttttcgtggctccctc

SEQ ID NO: 21910 - RNA, 22 nt, synthetic construct
  source 1..22: mol_type = other RNA
gatgaactcggctcgtttattt

SEQ ID NO: 21911 - RNA, 22 nt, synthetic construct
  source 1..22: mol_type = other RNA
gatgaaggagtccaggccccca

SEQ ID NO: 21912 - RNA, 22 nt, synthetic construct
  source 1..22: mol_type = other RNA
gatgagaagccccctcccttcc

SEQ ID NO: 21913 - RNA, 22 nt, synthetic construct
  source 1..22: mol_type = other RNA
gatgcaggacgagaaacacagc

SEQ ID NO: 21914 - RNA, 22 nt, synthetic construct
  source 1..22: mol_type = other RNA
gatgcaggggaacggggatgca

SEQ ID NO: 21915 - RNA, 22 nt, synthetic construct
  source 1..22: mol_type = other RNA
gatgcaggggaacggggctcag

SEQ ID NO: 21916 - RNA, 22 nt, synthetic construct
  source 1..22: mol_type = other RNA
gatgcaggggaagggggatgca

SEQ ID NO: 21917 - RNA, 22 nt, synthetic construct
  source 1..22: mol_type = other RNA
gatgcctgaggcctgggcacca

SEQ ID NO: 21918 - RNA, 22 nt, synthetic construct
  source 1..22: mol_type = other RNA
gatgcctgtactgggcaggtcc

SEQ ID NO: 21919 - RNA, 22 nt, synthetic construct
  source 1..22: mol_type = other RNA
gatgcgtgacctgcccggttct

SEQ ID NO: 21920 - RNA, 22 nt, synthetic construct
  source 1..22: mol_type = other RNA
gatgcttggggacctgcctgga

SEQ ID NO: 21921 - RNA, 22 nt, synthetic construct
  source 1..22: mol_type = other RNA
gatggagaaagagaaagggagt

SEQ ID NO: 21922 - RNA, 22 nt, synthetic construct
  source 1..22: mol_type = other RNA
gatgggcagctttggagaggtg

SEQ ID NO: 21923 - RNA, 22 nt, synthetic construct
  source 1..22: mol_type = other RNA
gatggtggacgaggaaggggga

SEQ ID NO: 21924 - RNA, 22 nt, synthetic construct
  source 1..22: mol_type = other RNA
gatggttggtcactgtctctgg

SEQ ID NO: 21925 - RNA, 22 nt, synthetic construct
  source 1..22: mol_type = other RNA
gattcccggccagtttctccac

SEQ ID NO: 21926 - RNA, 22 nt, synthetic construct
  source 1..22: mol_type = other RNA
gattcccttctcaggttacgtg

SEQ ID NO: 21927 - RNA, 22 nt, synthetic construct
  source 1..22: mol_type = other RNA
gattctcctccaactgtggggt

SEQ ID NO: 21928 - RNA, 22 nt, synthetic construct
  source 1..22: mol_type = other RNA
gattcttagggctgaacagaga

SEQ ID NO: 21929 - RNA, 22 nt, synthetic construct
  source 1..22: mol_type = other RNA
gattttgtttttccaaactgct

SEQ ID NO: 21930 - RNA, 22 nt, synthetic construct
  source 1..22: mol_type = other RNA
gcaaaacccccgtcaccaccca

SEQ ID NO: 21931 - RNA, 22 nt, synthetic construct
  source 1..22: mol_type = other RNA
gcaaacagcataagctggtcac

SEQ ID NO: 21932 - RNA, 22 nt, synthetic construct
  source 1..22: mol_type = other RNA
gcaaacaggaagtgaacgggga

SEQ ID NO: 21933 - RNA, 22 nt, synthetic construct
  source 1..22: mol_type = other RNA
gcaaactcactcttcggggtat

SEQ ID NO: 21934 - RNA, 22 nt, synthetic construct
  source 1..22: mol_type = other RNA
gcaaccaggcgtatcttaaaca

SEQ ID NO: 21935 - RNA, 22 nt, synthetic construct
  source 1..22: mol_type = other RNA
gcaagcccaggagaggcgctca

SEQ ID NO: 21936 - RNA, 22 nt, synthetic construct
  source 1..22: mol_type = other RNA
gcaaggagagcaatgggccttt

SEQ ID NO: 21937 - RNA, 22 nt, synthetic construct
  source 1..22: mol_type = other RNA
gcaagtccctcctccgaccccc

SEQ ID NO: 21938 - RNA, 22 nt, synthetic construct
  source 1..22: mol_type = other RNA
gcaagtcgggactccagaggga

SEQ ID NO: 21939 - RNA, 22 nt, synthetic construct
  source 1..22: mol_type = other RNA
gcaatgggcctttccctttcaa

SEQ ID NO: 21940 - RNA, 22 nt, synthetic construct
  source 1..22: mol_type = other RNA
gcaattggggtgcaggaatggg

SEQ ID NO: 21941 - RNA, 22 nt, synthetic construct
  source 1..22: mol_type = other RNA
gcacacaggtgtgcagctgtct

SEQ ID NO: 21942 - RNA, 22 nt, synthetic construct
  source 1..22: mol_type = other RNA
gcacacctgtgtgcctgggccc

SEQ ID NO: 21943 - RNA, 22 nt, synthetic construct
  source 1..22: mol_type = other RNA
gcacagggtggccttcctccac

SEQ ID NO: 21944 - RNA, 22 nt, synthetic construct
  source 1..22: mol_type = other RNA
gcaccagacggccgcgtcagag

SEQ ID NO: 21945 - RNA, 22 nt, synthetic construct
  source 1..22: mol_type = other RNA
gcaccaggatcagtgaaacgca

SEQ ID NO: 21946 - RNA, 22 nt, synthetic construct
  source 1..22: mol_type = other RNA
gcaccagggactccagagtcca

SEQ ID NO: 21947 - RNA, 22 nt, synthetic construct
  source 1..22: mol_type = other RNA
gcaccattctcacaaagggagt

SEQ ID NO: 21948 - RNA, 22 nt, synthetic construct
  source 1..22: mol_type = other RNA
gcacccagatgagaagccccct

SEQ ID NO: 21949 - RNA, 22 nt, synthetic construct
  source 1..22: mol_type = other RNA
gcaccccaattgccttagtggc

SEQ ID NO: 21950 - RNA, 22 nt, synthetic construct
  source 1..22: mol_type = other RNA
gcaccgtgtccctggatctgtt

SEQ ID NO: 21951 - RNA, 22 nt, synthetic construct
  source 1..22: mol_type = other RNA
gcacggaggaacaatataaatt

SEQ ID NO: 21952 - RNA, 22 nt, synthetic construct
  source 1..22: mol_type = other RNA
gcacggggccctgcagccaggg

SEQ ID NO: 21953 - RNA, 22 nt, synthetic construct
  source 1..22: mol_type = other RNA
gcacgtgccctgggaacgggat

SEQ ID NO: 21954 - RNA, 22 nt, synthetic construct
  source 1..22: mol_type = other RNA
gcacgtgcggccccttcacagc

SEQ ID NO: 21955 - RNA, 22 nt, synthetic construct
  source 1..22: mol_type = other RNA
gcactgaaaccctcagtcctag

SEQ ID NO: 21956 - RNA, 22 nt, synthetic construct
  source 1..22: mol_type = other RNA
gcactgaaggcctggccggcct

SEQ ID NO: 21957 - RNA, 22 nt, synthetic construct
  source 1..22: mol_type = other RNA
gcactggaagcgccacctgtgg

SEQ ID NO: 21958 - RNA, 22 nt, synthetic construct
  source 1..22: mol_type = other RNA
gcactggggactctttaaggaa

SEQ ID NO: 21959 - RNA, 22 nt, synthetic construct
  source 1..22: mol_type = other RNA
gcagagccaggaacccctgtag

SEQ ID NO: 21960 - RNA, 22 nt, synthetic construct
  source 1..22: mol_type = other RNA
gcagagggggcctcagtgaact

SEQ ID NO: 21961 - RNA, 22 nt, synthetic construct
  source 1..22: mol_type = other RNA
gcagagtatctgctggggtggt

SEQ ID NO: 21962 - RNA, 22 nt, synthetic construct
  source 1..22: mol_type = other RNA
gcagatactctgcaggaacgaa

SEQ ID NO: 21963 - RNA, 22 nt, synthetic construct
  source 1..22: mol_type = other RNA
gcagatagccaggagtcctttc

SEQ ID NO: 21964 - RNA, 22 nt, synthetic construct
  source 1..22: mol_type = other RNA
gcagcaccaggatcagtgaaac

SEQ ID NO: 21965 - RNA, 22 nt, synthetic construct
  source 1..22: mol_type = other RNA
gcagccaggggctgacacgggc

SEQ ID NO: 21966 - RNA, 22 nt, synthetic construct
  source 1..22: mol_type = other RNA
gcagcctggtagacagggctgg

SEQ ID NO: 21967 - RNA, 22 nt, synthetic construct
  source 1..22: mol_type = other RNA
gcagctcaggttctgggagagg

SEQ ID NO: 21968 - RNA, 22 nt, synthetic construct
  source 1..22: mol_type = other RNA
gcagctgtctcacccctctggg

SEQ ID NO: 21969 - RNA, 22 nt, synthetic construct
  source 1..22: mol_type = other RNA
gcagcttccttacacttcccaa

SEQ ID NO: 21970 - RNA, 22 nt, synthetic construct
  source 1..22: mol_type = other RNA
gcagctttggagaggtgaggga

SEQ ID NO: 21971 - RNA, 22 nt, synthetic construct
  source 1..22: mol_type = other RNA
gcaggaacgaagccgtgggccc

SEQ ID NO: 21972 - RNA, 22 nt, synthetic construct
  source 1..22: mol_type = other RNA
gcaggaatgggggcagggtacc

SEQ ID NO: 21973 - RNA, 22 nt, synthetic construct
  source 1..22: mol_type = other RNA
gcaggacgagaaacacagcccc

SEQ ID NO: 21974 - RNA, 22 nt, synthetic construct
  source 1..22: mol_type = other RNA
gcaggagagccaggggcatgag

SEQ ID NO: 21975 - RNA, 22 nt, synthetic construct
  source 1..22: mol_type = other RNA
gcaggaggggctgggggccagg

SEQ ID NO: 21976 - RNA, 22 nt, synthetic construct
  source 1..22: mol_type = other RNA
gcagggccccgtgcagaggggg

SEQ ID NO: 21977 - RNA, 22 nt, synthetic construct
  source 1..22: mol_type = other RNA
gcagggccttagggaagcggga

SEQ ID NO: 21978 - RNA, 22 nt, synthetic construct
  source 1..22: mol_type = other RNA
gcagggctgtggtgaggagggg

SEQ ID NO: 21979 - RNA, 22 nt, synthetic construct
  source 1..22: mol_type = other RNA
gcaggggaacggggatgcaggg

SEQ ID NO: 21980 - RNA, 22 nt, synthetic construct
  source 1..22: mol_type = other RNA
gcaggggaacggggctcagtct

SEQ ID NO: 21981 - RNA, 22 nt, synthetic construct
  source 1..22: mol_type = other RNA
gcaggggaagggggatgcaggg

SEQ ID NO: 21982 - RNA, 22 nt, synthetic construct
  source 1..22: mol_type = other RNA
gcaggggagctgggtttgggtc

SEQ ID NO: 21983 - RNA, 22 nt, synthetic construct
  source 1..22: mol_type = other RNA
gcaggggggcgatgcttgggga

SEQ ID NO: 21984 - RNA, 22 nt, synthetic construct
  source 1..22: mol_type = other RNA
gcagggtaccagcctcaccaag

SEQ ID NO: 21985 - RNA, 22 nt, synthetic construct
  source 1..22: mol_type = other RNA
gcagggtcccgcttccctaagg

SEQ ID NO: 21986 - RNA, 22 nt, synthetic construct
  source 1..22: mol_type = other RNA
gcagggtggaggaaggccaccc

SEQ ID NO: 21987 - RNA, 22 nt, synthetic construct
  source 1..22: mol_type = other RNA
gcagggtggccactgagaaccg

SEQ ID NO: 21988 - RNA, 22 nt, synthetic construct
  source 1..22: mol_type = other RNA
gcaggtccccaagcatcgcccc

SEQ ID NO: 21989 - RNA, 22 nt, synthetic construct
  source 1..22: mol_type = other RNA
gcaggtccttgaaagggaaagg

SEQ ID NO: 21990 - RNA, 22 nt, synthetic construct
  source 1..22: mol_type = other RNA
gcagtcaccccacagttggagg

SEQ ID NO: 21991 - RNA, 22 nt, synthetic construct
  source 1..22: mol_type = other RNA
gcagtttggaaaaacaaaatca

SEQ ID NO: 21992 - RNA, 22 nt, synthetic construct
  source 1..22: mol_type = other RNA
gcataagctggtcaccccacac

SEQ ID NO: 21993 - RNA, 22 nt, synthetic construct
  source 1..22: mol_type = other RNA
gcatagccctgggcccacggct

SEQ ID NO: 21994 - RNA, 22 nt, synthetic construct
  source 1..22: mol_type = other RNA
gcatcccccagaggccccaggc

SEQ ID NO: 21995 - RNA, 22 nt, synthetic construct
  source 1..22: mol_type = other RNA
gcatcccccttcccctgcatcc

SEQ ID NO: 21996 - RNA, 22 nt, synthetic construct
  source 1..22: mol_type = other RNA
gcatccccgttcccctgcatcc

SEQ ID NO: 21997 - RNA, 22 nt, synthetic construct
  source 1..22: mol_type = other RNA
gcatccctgtgaaagatgcctg

SEQ ID NO: 21998 - RNA, 22 nt, synthetic construct
  source 1..22: mol_type = other RNA
gcatccttctccaggcaggtcc

SEQ ID NO: 21999 - RNA, 22 nt, synthetic construct
  source 1..22: mol_type = other RNA
gcatcgcccccctgctgtggct

SEQ ID NO: 22000 - RNA, 22 nt, synthetic construct
  source 1..22: mol_type = other RNA
gcatctttcacagggatgcctg

SEQ ID NO: 22001 - RNA, 22 nt, synthetic construct
  source 1..22: mol_type = other RNA
gcatgagatggtggacgaggaa

SEQ ID NO: 22002 - RNA, 22 nt, synthetic construct
  source 1..22: mol_type = other RNA
gcatgaggtcatggaaactcgg

SEQ ID NO: 22003 - RNA, 22 nt, synthetic construct
  source 1..22: mol_type = other RNA
gcattggggtgggctggggttc

SEQ ID NO: 22004 - RNA, 22 nt, synthetic construct
  source 1..22: mol_type = other RNA
gccaaagttagaactcaggacc

SEQ ID NO: 22005 - RNA, 22 nt, synthetic construct
  source 1..22: mol_type = other RNA
gccaagaagcaggggagctggg

SEQ ID NO: 22006 - RNA, 22 nt, synthetic construct
  source 1..22: mol_type = other RNA
gccaagagcatgaggtcatgga

SEQ ID NO: 22007 - RNA, 22 nt, synthetic construct
  source 1..22: mol_type = other RNA
gccaagcagtcaccccacagtt

SEQ ID NO: 22008 - RNA, 22 nt, synthetic construct
  source 1..22: mol_type = other RNA
gccaaggactcaaacccagaag

SEQ ID NO: 22009 - RNA, 22 nt, synthetic construct
  source 1..22: mol_type = other RNA
gccaagtaggtggcctggggcc

SEQ ID NO: 22010 - RNA, 22 nt, synthetic construct
  source 1..22: mol_type = other RNA
gccacagcaggggggcgatgct

SEQ ID NO: 22011 - RNA, 22 nt, synthetic construct
  source 1..22: mol_type = other RNA
gccaccccagccctgtctacca

SEQ ID NO: 22012 - RNA, 22 nt, synthetic construct
  source 1..22: mol_type = other RNA
gccaccctgcgctaccctctcc

SEQ ID NO: 22013 - RNA, 22 nt, synthetic construct
  source 1..22: mol_type = other RNA
gccaccctgtgctgggacagac

SEQ ID NO: 22014 - RNA, 22 nt, synthetic construct
  source 1..22: mol_type = other RNA
gccaccgtttctcattcttccc

SEQ ID NO: 22015 - RNA, 22 nt, synthetic construct
  source 1..22: mol_type = other RNA
gccacctacttggcctggaccc

SEQ ID NO: 22016 - RNA, 22 nt, synthetic construct
  source 1..22: mol_type = other RNA
gccacctgtgggtggtgacggg

SEQ ID NO: 22017 - RNA, 22 nt, synthetic construct
  source 1..22: mol_type = other RNA
gccacgaaaacagatccaggga

SEQ ID NO: 22018 - RNA, 22 nt, synthetic construct
  source 1..22: mol_type = other RNA
gccacgacctggtgaacaccta

SEQ ID NO: 22019 - RNA, 22 nt, synthetic construct
  source 1..22: mol_type = other RNA
gccacggtgtcccagcaagtcg

SEQ ID NO: 22020 - RNA, 22 nt, synthetic construct
  source 1..22: mol_type = other RNA
gccacgtaacctgagaagggaa

SEQ ID NO: 22021 - RNA, 22 nt, synthetic construct
  source 1..22: mol_type = other RNA
gccactaaggcaattggggtgc

SEQ ID NO: 22022 - RNA, 22 nt, synthetic construct
  source 1..22: mol_type = other RNA
gccactgagaaccgggcaggtc

SEQ ID NO: 22023 - RNA, 22 nt, synthetic construct
  source 1..22: mol_type = other RNA
gccactggctgtttaagatacg

SEQ ID NO: 22024 - RNA, 22 nt, synthetic construct
  source 1..22: mol_type = other RNA
gccagaggctgttgggtcattt

SEQ ID NO: 22025 - RNA, 22 nt, synthetic construct
  source 1..22: mol_type = other RNA
gccagccccgtcctggcagggc

SEQ ID NO: 22026 - RNA, 22 nt, synthetic construct
  source 1..22: mol_type = other RNA
gccaggaacccctgtagggaag

SEQ ID NO: 22027 - RNA, 22 nt, synthetic construct
  source 1..22: mol_type = other RNA
gccaggacggggctggctactg

SEQ ID NO: 22028 - RNA, 22 nt, synthetic construct
  source 1..22: mol_type = other RNA
gccaggactcctggctctgaag

SEQ ID NO: 22029 - RNA, 22 nt, synthetic construct
  source 1..22: mol_type = other RNA
gccaggagtcctggcccccagc

SEQ ID NO: 22030 - RNA, 22 nt, synthetic construct
  source 1..22: mol_type = other RNA
gccaggagtcctttcgtggttt

SEQ ID NO: 22031 - RNA, 22 nt, synthetic construct
  source 1..22: mol_type = other RNA
gccaggattcttagggctgaac

SEQ ID NO: 22032 - RNA, 22 nt, synthetic construct
  source 1..22: mol_type = other RNA
gccaggccccagcccttccgcc

SEQ ID NO: 22033 - RNA, 22 nt, synthetic construct
  source 1..22: mol_type = other RNA
gccaggccttcagtgctcagtg

SEQ ID NO: 22034 - RNA, 22 nt, synthetic construct
  source 1..22: mol_type = other RNA
gccaggggcatgagatggtgga

SEQ ID NO: 22035 - RNA, 22 nt, synthetic construct
  source 1..22: mol_type = other RNA
gccaggggctgacacgggccac

SEQ ID NO: 22036 - RNA, 22 nt, synthetic construct
  source 1..22: mol_type = other RNA
gccaggtccttccaagggtcaa

SEQ ID NO: 22037 - RNA, 22 nt, synthetic construct
  source 1..22: mol_type = other RNA
gccagtagccagccccgtcctg

SEQ ID NO: 22038 - RNA, 22 nt, synthetic construct
  source 1..22: mol_type = other RNA
gccagtggccagaggctgttgg

SEQ ID NO: 22039 - RNA, 22 nt, synthetic construct
  source 1..22: mol_type = other RNA
gccagtttctccacctggggct

SEQ ID NO: 22040 - RNA, 22 nt, synthetic construct
  source 1..22: mol_type = other RNA
gccatgacaactgggtggaaat

SEQ ID NO: 22041 - RNA, 22 nt, synthetic construct
  source 1..22: mol_type = other RNA
gcccaacccctccccattcaac

SEQ ID NO: 22042 - RNA, 22 nt, synthetic construct
  source 1..22: mol_type = other RNA
gcccacccagtgtccacaaggc

SEQ ID NO: 22043 - RNA, 22 nt, synthetic construct
  source 1..22: mol_type = other RNA
gcccaccccaatgctccaggcc

SEQ ID NO: 22044 - RNA, 22 nt, synthetic construct
  source 1..22: mol_type = other RNA
gcccacggcttcgttcctgcag

SEQ ID NO: 22045 - RNA, 22 nt, synthetic construct
  source 1..22: mol_type = other RNA
gcccagagcagggccttaggga

SEQ ID NO: 22046 - RNA, 22 nt, synthetic construct
  source 1..22: mol_type = other RNA
gcccagagcagggtcccgcttc

SEQ ID NO: 22047 - RNA, 22 nt, synthetic construct
  source 1..22: mol_type = other RNA
gcccagccccgcctccctaaga

SEQ ID NO: 22048 - RNA, 22 nt, synthetic construct
  source 1..22: mol_type = other RNA
gcccaggacagcctagttttag

SEQ ID NO: 22049 - RNA, 22 nt, synthetic construct
  source 1..22: mol_type = other RNA
gcccaggagaggcgctcaggct

SEQ ID NO: 22050 - RNA, 22 nt, synthetic construct
  source 1..22: mol_type = other RNA
gcccaggcacacaggtgtgcag

SEQ ID NO: 22051 - RNA, 22 nt, synthetic construct
  source 1..22: mol_type = other RNA
gcccaggcccccagctcttctc

SEQ ID NO: 22052 - RNA, 22 nt, synthetic construct
  source 1..22: mol_type = other RNA
gcccaggcccctgagtctgtcc

SEQ ID NO: 22053 - RNA, 22 nt, synthetic construct
  source 1..22: mol_type = other RNA
gcccaggcctcaggcatctttc

SEQ ID NO: 22054 - RNA, 22 nt, synthetic construct
  source 1..22: mol_type = other RNA
gcccagggctatgcagggtgga

SEQ ID NO: 22055 - RNA, 22 nt, synthetic construct
  source 1..22: mol_type = other RNA
gcccagtacaggcatccctgtg

SEQ ID NO: 22056 - RNA, 22 nt, synthetic construct
  source 1..22: mol_type = other RNA
gcccagtggtcaggccggccag

SEQ ID NO: 22057 - RNA, 22 nt, synthetic construct
  source 1..22: mol_type = other RNA
gcccatctggaggaggcgggag

SEQ ID NO: 22058 - RNA, 22 nt, synthetic construct
  source 1..22: mol_type = other RNA
gcccattgctctccttgccccc

SEQ ID NO: 22059 - RNA, 22 nt, synthetic construct
  source 1..22: mol_type = other RNA
gccccagcccctcctctctcaa

SEQ ID NO: 22060 - RNA, 22 nt, synthetic construct
  source 1..22: mol_type = other RNA
gccccagcccttccgccctcag

SEQ ID NO: 22061 - RNA, 22 nt, synthetic construct
  source 1..22: mol_type = other RNA
gccccaggccacctacttggcc

SEQ ID NO: 22062 - RNA, 22 nt, synthetic construct
  source 1..22: mol_type = other RNA
gccccaggccttgtggacactg

SEQ ID NO: 22063 - RNA, 22 nt, synthetic construct
  source 1..22: mol_type = other RNA
gccccaggctgtcacactccag

SEQ ID NO: 22064 - RNA, 22 nt, synthetic construct
  source 1..22: mol_type = other RNA
gccccaggtggagaaactggcc

SEQ ID NO: 22065 - RNA, 22 nt, synthetic construct
  source 1..22: mol_type = other RNA
gcccccaaccccctagccacta

SEQ ID NO: 22066 - RNA, 22 nt, synthetic construct
  source 1..22: mol_type = other RNA
gcccccagcccctcctccctca

SEQ ID NO: 22067 - RNA, 22 nt, synthetic construct
  source 1..22: mol_type = other RNA
gcccccagcccctcctgcctta

SEQ ID NO: 22068 - RNA, 22 nt, synthetic construct
  source 1..22: mol_type = other RNA
gcccccagcctctccccattca

SEQ ID NO: 22069 - RNA, 22 nt, synthetic construct
  source 1..22: mol_type = other RNA
gcccccagctcttctctgttca

SEQ ID NO: 22070 - RNA, 22 nt, synthetic construct
  source 1..22: mol_type = other RNA
gcccccagtccctccaccctca

SEQ ID NO: 22071 - RNA, 22 nt, synthetic construct
  source 1..22: mol_type = other RNA
gcccccattcctgcaccccaat

SEQ ID NO: 22072 - RNA, 22 nt, synthetic construct
  source 1..22: mol_type = other RNA
gcccccctcccctatcgccatg

SEQ ID NO: 22073 - RNA, 22 nt, synthetic construct
  source 1..22: mol_type = other RNA
gcccccctgctgtggctgttcc

SEQ ID NO: 22074 - RNA, 22 nt, synthetic construct
  source 1..22: mol_type = other RNA
gccccctcccttccccgttcac

SEQ ID NO: 22075 - RNA, 22 nt, synthetic construct
  source 1..22: mol_type = other RNA
gccccctctgcacggggccctg

SEQ ID NO: 22076 - RNA, 22 nt, synthetic construct
  source 1..22: mol_type = other RNA
gccccgcctccctaagacccag

SEQ ID NO: 22077 - RNA, 22 nt, synthetic construct
  source 1..22: mol_type = other RNA
gccccgtcctggcagggctgtg

SEQ ID NO: 22078 - RNA, 22 nt, synthetic construct
  source 1..22: mol_type = other RNA
gccccgtgcagagggggcctca

SEQ ID NO: 22079 - RNA, 22 nt, synthetic construct
  source 1..22: mol_type = other RNA
gccccgttcccctgcatccccg

SEQ ID NO: 22080 - RNA, 22 nt, synthetic construct
  source 1..22: mol_type = other RNA
gcccctcctactctagccccca

SEQ ID NO: 22081 - RNA, 22 nt, synthetic construct
  source 1..22: mol_type = other RNA
gcccctcctccttcagagccag

SEQ ID NO: 22082 - RNA, 22 nt, synthetic construct
  source 1..22: mol_type = other RNA
gcccctcctctctcaaacccag

SEQ ID NO: 22083 - RNA, 22 nt, synthetic construct
  source 1..22: mol_type = other RNA
gcccctcctgccttaaacccag

SEQ ID NO: 22084 - RNA, 22 nt, synthetic construct
  source 1..22: mol_type = other RNA
gcccctgagtctgtcccagcac

SEQ ID NO: 22085 - RNA, 22 nt, synthetic construct
  source 1..22: mol_type = other RNA
gcccctggctctcctgcccctt

SEQ ID NO: 22086 - RNA, 22 nt, synthetic construct
  source 1..22: mol_type = other RNA
gcccctggctgcagggccccgt

SEQ ID NO: 22087 - RNA, 22 nt, synthetic construct
  source 1..22: mol_type = other RNA
gccccttcacagcccgagtttc

SEQ ID NO: 22088 - RNA, 22 nt, synthetic construct
  source 1..22: mol_type = other RNA
gccccttccctacaggggttcc

SEQ ID NO: 22089 - RNA, 22 nt, synthetic construct
  source 1..22: mol_type = other RNA
gcccgagtttccatgacctcat

SEQ ID NO: 22090 - RNA, 22 nt, synthetic construct
  source 1..22: mol_type = other RNA
gcccggttctcagtggccaccc

SEQ ID NO: 22091 - RNA, 22 nt, synthetic construct
  source 1..22: mol_type = other RNA
gcccgtgtcagcccctggctgc

SEQ ID NO: 22092 - RNA, 22 nt, synthetic construct
  source 1..22: mol_type = other RNA
gccctaagaatcctggctccag

SEQ ID NO: 22093 - RNA, 22 nt, synthetic construct
  source 1..22: mol_type = other RNA
gccctcagatgaaggagtccag

SEQ ID NO: 22094 - RNA, 22 nt, synthetic construct
  source 1..22: mol_type = other RNA
gccctcgtagctccctcccgcc

SEQ ID NO: 22095 - RNA, 22 nt, synthetic construct
  source 1..22: mol_type = other RNA
gccctgcagccaggggctgaca

SEQ ID NO: 22096 - RNA, 22 nt, synthetic construct
  source 1..22: mol_type = other RNA
gccctgccaggacggggctggc

SEQ ID NO: 22097 - RNA, 22 nt, synthetic construct
  source 1..22: mol_type = other RNA
gccctgctctgggcttctgggt

SEQ ID NO: 22098 - RNA, 22 nt, synthetic construct
  source 1..22: mol_type = other RNA
gccctgggaacgggatgaactc

SEQ ID NO: 22099 - RNA, 22 nt, synthetic construct
  source 1..22: mol_type = other RNA
gccctgggcccacggcttcgtt

SEQ ID NO: 22100 - RNA, 22 nt, synthetic construct
  source 1..22: mol_type = other RNA
gccctgtctaccaggctgcctt

SEQ ID NO: 22101 - RNA, 22 nt, synthetic construct
  source 1..22: mol_type = other RNA
gcccttccgccctcagatgaag

SEQ ID NO: 22102 - RNA, 22 nt, synthetic construct
  source 1..22: mol_type = other RNA
gccgaagtccagggggtcggag

SEQ ID NO: 22103 - RNA, 22 nt, synthetic construct
  source 1..22: mol_type = other RNA
gccgagttcatcccgttcccag

SEQ ID NO: 22104 - RNA, 22 nt, synthetic construct
  source 1..22: mol_type = other RNA
gccgcacgtgccctgggaacgg

SEQ ID NO: 22105 - RNA, 22 nt, synthetic construct
  source 1..22: mol_type = other RNA
gccgcctctactccctttctct

SEQ ID NO: 22106 - RNA, 22 nt, synthetic construct
  source 1..22: mol_type = other RNA
gccgcgtcagagcagctcaggt

SEQ ID NO: 22107 - RNA, 22 nt, synthetic construct
  source 1..22: mol_type = other RNA
gccggccaggccttcagtgctc

SEQ ID NO: 22108 - RNA, 22 nt, synthetic construct
  source 1..22: mol_type = other RNA
gccggcctgaccactgggcaac

SEQ ID NO: 22109 - RNA, 22 nt, synthetic construct
  source 1..22: mol_type = other RNA
gccgggaatcaagagtcaccca

SEQ ID NO: 22110 - RNA, 22 nt, synthetic construct
  source 1..22: mol_type = other RNA
gccgtctggtgcgtttcactga

SEQ ID NO: 22111 - RNA, 22 nt, synthetic construct
  source 1..22: mol_type = other RNA
gccgtgggcccagggctatgca

SEQ ID NO: 22112 - RNA, 22 nt, synthetic construct
  source 1..22: mol_type = other RNA
gccgtgtctaacaggtaccatg

SEQ ID NO: 22113 - RNA, 22 nt, synthetic construct
  source 1..22: mol_type = other RNA
gcctagttttagcactgaaacc

SEQ ID NO: 22114 - RNA, 22 nt, synthetic construct
  source 1..22: mol_type = other RNA
gcctcaccaagtggttgataaa

SEQ ID NO: 22115 - RNA, 22 nt, synthetic construct
  source 1..22: mol_type = other RNA
gcctcaggcatctttcacaggg

SEQ ID NO: 22116 - RNA, 22 nt, synthetic construct
  source 1..22: mol_type = other RNA
gcctcagtgaactggagtgtga

SEQ ID NO: 22117 - RNA, 22 nt, synthetic construct
  source 1..22: mol_type = other RNA
gcctccctaagacccagaagtc

SEQ ID NO: 22118 - RNA, 22 nt, synthetic construct
  source 1..22: mol_type = other RNA
gcctcctccagatgggcagctt

SEQ ID NO: 22119 - RNA, 22 nt, synthetic construct
  source 1..22: mol_type = other RNA
gcctcctgggataccccgaaga

SEQ ID NO: 22120 - RNA, 22 nt, synthetic construct
  source 1..22: mol_type = other RNA
gcctcctgggttgaatggggag

SEQ ID NO: 22121 - RNA, 22 nt, synthetic construct
  source 1..22: mol_type = other RNA
gcctctactccctttctctttc

SEQ ID NO: 22122 - RNA, 22 nt, synthetic construct
  source 1..22: mol_type = other RNA
gcctctccccattcagacccag

SEQ ID NO: 22123 - RNA, 22 nt, synthetic construct
  source 1..22: mol_type = other RNA
gcctctcctgggcttgccaagg

SEQ ID NO: 22124 - RNA, 22 nt, synthetic construct
  source 1..22: mol_type = other RNA
gcctctcgtggggtccaggcca

SEQ ID NO: 22125 - RNA, 22 nt, synthetic construct
  source 1..22: mol_type = other RNA
gcctctggccactggctgttta

SEQ ID NO: 22126 - RNA, 22 nt, synthetic construct
  source 1..22: mol_type = other RNA
gcctctgggggatgcaggggaa

SEQ ID NO: 22127 - RNA, 22 nt, synthetic construct
  source 1..22: mol_type = other RNA
gcctgaccactgggcaaccagg

SEQ ID NO: 22128 - RNA, 22 nt, synthetic construct
  source 1..22: mol_type = other RNA
gcctgagcgcctctcctgggct

SEQ ID NO: 22129 - RNA, 22 nt, synthetic construct
  source 1..22: mol_type = other RNA
gcctgaggcctgggcaccaggg

SEQ ID NO: 22130 - RNA, 22 nt, synthetic construct
  source 1..22: mol_type = other RNA
gcctggaccccacgagaggcca

SEQ ID NO: 22131 - RNA, 22 nt, synthetic construct
  source 1..22: mol_type = other RNA
gcctggacccctgggtctgaat

SEQ ID NO: 22132 - RNA, 22 nt, synthetic construct
  source 1..22: mol_type = other RNA
gcctggactccttcatctgagg

SEQ ID NO: 22133 - RNA, 22 nt, synthetic construct
  source 1..22: mol_type = other RNA
gcctggactctggagtccctgg

SEQ ID NO: 22134 - RNA, 22 nt, synthetic construct
  source 1..22: mol_type = other RNA
gcctggacttctgggtcttagg

SEQ ID NO: 22135 - RNA, 22 nt, synthetic construct
  source 1..22: mol_type = other RNA
gcctggagaaggatgcaggacg

SEQ ID NO: 22136 - RNA, 22 nt, synthetic construct
  source 1..22: mol_type = other RNA
gcctggagcattggggtgggct

SEQ ID NO: 22137 - RNA, 22 nt, synthetic construct
  source 1..22: mol_type = other RNA
gcctggccggcctgaccactgg

SEQ ID NO: 22138 - RNA, 22 nt, synthetic construct
  source 1..22: mol_type = other RNA
gcctggcctcctgggttgaatg

SEQ ID NO: 22139 - RNA, 22 nt, synthetic construct
  source 1..22: mol_type = other RNA
gcctgggcaccagggactccag

SEQ ID NO: 22140 - RNA, 22 nt, synthetic construct
  source 1..22: mol_type = other RNA
gcctgggccccaggctgtcaca

SEQ ID NO: 22141 - RNA, 22 nt, synthetic construct
  source 1..22: mol_type = other RNA
gcctgggcgggactcccagagg

SEQ ID NO: 22142 - RNA, 22 nt, synthetic construct
  source 1..22: mol_type = other RNA
gcctgggctcctgggtttgaga

SEQ ID NO: 22143 - RNA, 22 nt, synthetic construct
  source 1..22: mol_type = other RNA
gcctggggcaagtccctcctcc

SEQ ID NO: 22144 - RNA, 22 nt, synthetic construct
  source 1..22: mol_type = other RNA
gcctggggcccaggcacacagg

SEQ ID NO: 22145 - RNA, 22 nt, synthetic construct
  source 1..22: mol_type = other RNA
gcctggggcctctgggggatgc

SEQ ID NO: 22146 - RNA, 22 nt, synthetic construct
  source 1..22: mol_type = other RNA
gcctggtagacagggctggggt

SEQ ID NO: 22147 - RNA, 22 nt, synthetic construct
  source 1..22: mol_type = other RNA
gcctggttgcccagtggtcagg

SEQ ID NO: 22148 - RNA, 22 nt, synthetic construct
  source 1..22: mol_type = other RNA
gcctgtactgggcaggtccttg

SEQ ID NO: 22149 - RNA, 22 nt, synthetic construct
  source 1..22: mol_type = other RNA
gccttaaacccagccaggtcct

SEQ ID NO: 22150 - RNA, 22 nt, synthetic construct
  source 1..22: mol_type = other RNA
gccttagggaagcgggaccctg

SEQ ID NO: 22151 - RNA, 22 nt, synthetic construct
  source 1..22: mol_type = other RNA
gccttagtggctagggggttgg

SEQ ID NO: 22152 - RNA, 22 nt, synthetic construct
  source 1..22: mol_type = other RNA
gccttatctcacaggtaaaact

SEQ ID NO: 22153 - RNA, 22 nt, synthetic construct
  source 1..22: mol_type = other RNA
gccttcagtgctcagtggaaac

SEQ ID NO: 22154 - RNA, 22 nt, synthetic construct
  source 1..22: mol_type = other RNA
gccttcctccaccctgcatagc

SEQ ID NO: 22155 - RNA, 22 nt, synthetic construct
  source 1..22: mol_type = other RNA
gccttgtggacactgggtgggc

SEQ ID NO: 22156 - RNA, 22 nt, synthetic construct
  source 1..22: mol_type = other RNA
gcctttccctttcaaggacctg

SEQ ID NO: 22157 - RNA, 22 nt, synthetic construct
  source 1..22: mol_type = other RNA
gccttttgggtggattctcctc

SEQ ID NO: 22158 - RNA, 22 nt, synthetic construct
  source 1..22: mol_type = other RNA
gcgataggggaggggggcaagg

SEQ ID NO: 22159 - RNA, 22 nt, synthetic construct
  source 1..22: mol_type = other RNA
gcgatgcttggggacctgcctg

SEQ ID NO: 22160 - RNA, 22 nt, synthetic construct
  source 1..22: mol_type = other RNA
gcgcagggtggccactgagaac

SEQ ID NO: 22161 - RNA, 22 nt, synthetic construct
  source 1..22: mol_type = other RNA
gcgccacctgtgggtggtgacg

SEQ ID NO: 22162 - RNA, 22 nt, synthetic construct
  source 1..22: mol_type = other RNA
gcgcctctcctgggcttgccaa

SEQ ID NO: 22163 - RNA, 22 nt, synthetic construct
  source 1..22: mol_type = other RNA
gcgctaccctctcccagaacct

SEQ ID NO: 22164 - RNA, 22 nt, synthetic construct
  source 1..22: mol_type = other RNA
gcgctcaggcttccctgtcccc

SEQ ID NO: 22165 - RNA, 22 nt, synthetic construct
  source 1..22: mol_type = other RNA
gcgcttccagtgctcagactag

SEQ ID NO: 22166 - RNA, 22 nt, synthetic construct
  source 1..22: mol_type = other RNA
gcggaagggctggggcctggcc

SEQ ID NO: 22167 - RNA, 22 nt, synthetic construct
  source 1..22: mol_type = other RNA
gcggaggaatatgtcccagata

SEQ ID NO: 22168 - RNA, 22 nt, synthetic construct
  source 1..22: mol_type = other RNA
gcggccacgacctggtgaacac

SEQ ID NO: 22169 - RNA, 22 nt, synthetic construct
  source 1..22: mol_type = other RNA
gcggccccttcacagcccgagt

SEQ ID NO: 22170 - RNA, 22 nt, synthetic construct
  source 1..22: mol_type = other RNA
gcggccgtctggtgcgtttcac

SEQ ID NO: 22171 - RNA, 22 nt, synthetic construct
  source 1..22: mol_type = other RNA
gcgggaaccccacatggtacct

SEQ ID NO: 22172 - RNA, 22 nt, synthetic construct
  source 1..22: mol_type = other RNA
gcgggaccctgctctgggcgga

SEQ ID NO: 22173 - RNA, 22 nt, synthetic construct
  source 1..22: mol_type = other RNA
gcgggactcccagaggggtgag

SEQ ID NO: 22174 - RNA, 22 nt, synthetic construct
  source 1..22: mol_type = other RNA
gcgggagggagctacgagggcc

SEQ ID NO: 22175 - RNA, 22 nt, synthetic construct
  source 1..22: mol_type = other RNA
gcggggctgggcctggacccct

SEQ ID NO: 22176 - RNA, 22 nt, synthetic construct
  source 1..22: mol_type = other RNA
gcgtatcttaaacagccagtgg

SEQ ID NO: 22177 - RNA, 22 nt, synthetic construct
  source 1..22: mol_type = other RNA
gcgtcagagcagctcaggttct

SEQ ID NO: 22178 - RNA, 22 nt, synthetic construct
  source 1..22: mol_type = other RNA
gcgtcagttttacctgtgagat

SEQ ID NO: 22179 - RNA, 22 nt, synthetic construct
  source 1..22: mol_type = other RNA
gcgtcctaggtgttcaccaggt

SEQ ID NO: 22180 - RNA, 22 nt, synthetic construct
  source 1..22: mol_type = other RNA
gcgtgacctgcccggttctcag

SEQ ID NO: 22181 - RNA, 22 nt, synthetic construct
  source 1..22: mol_type = other RNA
gcgtttcactgatcctggtgct

SEQ ID NO: 22182 - RNA, 22 nt, synthetic construct
  source 1..22: mol_type = other RNA
gctaaaactaggctgtcctggg

SEQ ID NO: 22183 - RNA, 22 nt, synthetic construct
  source 1..22: mol_type = other RNA
gctaaactcctagatccacggg

SEQ ID NO: 22184 - RNA, 22 nt, synthetic construct
  source 1..22: mol_type = other RNA
gctaccctctcccagaacctga

SEQ ID NO: 22185 - RNA, 22 nt, synthetic construct
  source 1..22: mol_type = other RNA
gctacgagggccaagagcatga

SEQ ID NO: 22186 - RNA, 22 nt, synthetic construct
  source 1..22: mol_type = other RNA
gctactggccttatctcacagg

SEQ ID NO: 22187 - RNA, 22 nt, synthetic construct
  source 1..22: mol_type = other RNA
gctagagtaggaggggctggag

SEQ ID NO: 22188 - RNA, 22 nt, synthetic construct
  source 1..22: mol_type = other RNA
gctaggacagtggggaaaatga

SEQ ID NO: 22189 - RNA, 22 nt, synthetic construct
  source 1..22: mol_type = other RNA
gctagggggttgggggctagag

SEQ ID NO: 22190 - RNA, 22 nt, synthetic construct
  source 1..22: mol_type = other RNA
gctatctgcaaacaggaagtga

SEQ ID NO: 22191 - RNA, 22 nt, synthetic construct
  source 1..22: mol_type = other RNA
gctatctgggacatattcctcc

SEQ ID NO: 22192 - RNA, 22 nt, synthetic construct
  source 1..22: mol_type = other RNA
gctatgcagggtggaggaaggc

SEQ ID NO: 22193 - RNA, 22 nt, synthetic construct
  source 1..22: mol_type = other RNA
gctcagactagggaagaggttc

SEQ ID NO: 22194 - RNA, 22 nt, synthetic construct
  source 1..22: mol_type = other RNA
gctcaggcttccctgtccccct

SEQ ID NO: 22195 - RNA, 22 nt, synthetic construct
  source 1..22: mol_type = other RNA
gctcaggttctgggagagggta

SEQ ID NO: 22196 - RNA, 22 nt, synthetic construct
  source 1..22: mol_type = other RNA
gctcagtctgaagagcagagcc

SEQ ID NO: 22197 - RNA, 22 nt, synthetic construct
  source 1..22: mol_type = other RNA
gctcagtggaaaccacgaaagg

SEQ ID NO: 22198 - RNA, 22 nt, synthetic construct
  source 1..22: mol_type = other RNA
gctccagcccctcctactctag

SEQ ID NO: 22199 - RNA, 22 nt, synthetic construct
  source 1..22: mol_type = other RNA
gctccaggcctcctgggatacc

SEQ ID NO: 22200 - RNA, 22 nt, synthetic construct
  source 1..22: mol_type = other RNA
gctccagttcaggtcccggagc

SEQ ID NO: 22201 - RNA, 22 nt, synthetic construct
  source 1..22: mol_type = other RNA
gctcccctgcttcttggccacg

SEQ ID NO: 22202 - RNA, 22 nt, synthetic construct
  source 1..22: mol_type = other RNA
gctccctcccgcctcctccaga

SEQ ID NO: 22203 - RNA, 22 nt, synthetic construct
  source 1..22: mol_type = other RNA
gctccctctggagtcccgactt

SEQ ID NO: 22204 - RNA, 22 nt, synthetic construct
  source 1..22: mol_type = other RNA
gctccgggacctgaactggagc

SEQ ID NO: 22205 - RNA, 22 nt, synthetic construct
  source 1..22: mol_type = other RNA
gctcctgggtttgagagaggag

SEQ ID NO: 22206 - RNA, 22 nt, synthetic construct
  source 1..22: mol_type = other RNA
gctcggaaaccaccccagcaga

SEQ ID NO: 22207 - RNA, 22 nt, synthetic construct
  source 1..22: mol_type = other RNA
gctcgtttatttccacccagtt

SEQ ID NO: 22208 - RNA, 22 nt, synthetic construct
  source 1..22: mol_type = other RNA
gctctcctgccccttccctaca

SEQ ID NO: 22209 - RNA, 22 nt, synthetic construct
  source 1..22: mol_type = other RNA
gctctccttgcccccctcccct

SEQ ID NO: 22210 - RNA, 22 nt, synthetic construct
  source 1..22: mol_type = other RNA
gctctgaaggaggaggggctgg

SEQ ID NO: 22211 - RNA, 22 nt, synthetic construct
  source 1..22: mol_type = other RNA
gctctgacgcggccgtctggtg

SEQ ID NO: 22212 - RNA, 22 nt, synthetic construct
  source 1..22: mol_type = other RNA
gctctgctcttcagactgagcc

SEQ ID NO: 22213 - RNA, 22 nt, synthetic construct
  source 1..22: mol_type = other RNA
gctctgggcggaggaatatgtc

SEQ ID NO: 22214 - RNA, 22 nt, synthetic construct
  source 1..22: mol_type = other RNA
gctctgggcttctgggtttgag

SEQ ID NO: 22215 - RNA, 22 nt, synthetic construct
  source 1..22: mol_type = other RNA
gctcttcacctttctagtcccc

SEQ ID NO: 22216 - RNA, 22 nt, synthetic construct
  source 1..22: mol_type = other RNA
gctcttcagactgagccccgtt

SEQ ID NO: 22217 - RNA, 22 nt, synthetic construct
  source 1..22: mol_type = other RNA
gctcttctctgttcagccctaa

SEQ ID NO: 22218 - RNA, 22 nt, synthetic construct
  source 1..22: mol_type = other RNA
gctcttggccctcgtagctccc

SEQ ID NO: 22219 - RNA, 22 nt, synthetic construct
  source 1..22: mol_type = other RNA
gctgaacagagaagagctgggg

SEQ ID NO: 22220 - RNA, 22 nt, synthetic construct
  source 1..22: mol_type = other RNA
gctgacacgggccaccgtttct

SEQ ID NO: 22221 - RNA, 22 nt, synthetic construct
  source 1..22: mol_type = other RNA
gctgaggaaggagtgaagctaa

SEQ ID NO: 22222 - RNA, 22 nt, synthetic construct
  source 1..22: mol_type = other RNA
gctgcacacctgtgtgcctggg

SEQ ID NO: 22223 - RNA, 22 nt, synthetic construct
  source 1..22: mol_type = other RNA
gctgcagcaccaggatcagtga

SEQ ID NO: 22224 - RNA, 22 nt, synthetic construct
  source 1..22: mol_type = other RNA
gctgcagcttccttacacttcc

SEQ ID NO: 22225 - RNA, 22 nt, synthetic construct
  source 1..22: mol_type = other RNA
gctgcagggccccgtgcagagg

SEQ ID NO: 22226 - RNA, 22 nt, synthetic construct
  source 1..22: mol_type = other RNA
gctgcccatctggaggaggcgg

SEQ ID NO: 22227 - RNA, 22 nt, synthetic construct
  source 1..22: mol_type = other RNA
gctgccttttgggtggattctc

SEQ ID NO: 22228 - RNA, 22 nt, synthetic construct
  source 1..22: mol_type = other RNA
gctgctctgacgcggccgtctg

SEQ ID NO: 22229 - RNA, 22 nt, synthetic construct
  source 1..22: mol_type = other RNA
gctggaacctcttccctagtct

SEQ ID NO: 22230 - RNA, 22 nt, synthetic construct
  source 1..22: mol_type = other RNA
gctggagccaggattcttaggg

SEQ ID NO: 22231 - RNA, 22 nt, synthetic construct
  source 1..22: mol_type = other RNA
gctggctactggccttatctca

SEQ ID NO: 22232 - RNA, 22 nt, synthetic construct
  source 1..22: mol_type = other RNA
gctgggacagactcaggggcct

SEQ ID NO: 22233 - RNA, 22 nt, synthetic construct
  source 1..22: mol_type = other RNA
gctgggcctggacccctgggtc

SEQ ID NO: 22234 - RNA, 22 nt, synthetic construct
  source 1..22: mol_type = other RNA
gctggggcctggactcctgggt

SEQ ID NO: 22235 - RNA, 22 nt, synthetic construct
  source 1..22: mol_type = other RNA
gctggggcctggactcgtgggt

SEQ ID NO: 22236 - RNA, 22 nt, synthetic construct
  source 1..22: mol_type = other RNA
gctggggcctggcctcctgggt

SEQ ID NO: 22237 - RNA, 22 nt, synthetic construct
  source 1..22: mol_type = other RNA
gctgggggccaggactcctggc

SEQ ID NO: 22238 - RNA, 22 nt, synthetic construct
  source 1..22: mol_type = other RNA
gctgggggcctggactccttca

SEQ ID NO: 22239 - RNA, 22 nt, synthetic construct
  source 1..22: mol_type = other RNA
gctgggggcctggacttctggg

SEQ ID NO: 22240 - RNA, 22 nt, synthetic construct
  source 1..22: mol_type = other RNA
gctgggggcctgggctcctggg

SEQ ID NO: 22241 - RNA, 22 nt, synthetic construct
  source 1..22: mol_type = other RNA
gctggggtggcctctcgtgggg

SEQ ID NO: 22242 - RNA, 22 nt, synthetic construct
  source 1..22: mol_type = other RNA
gctggggtggtttccgagcttg

SEQ ID NO: 22243 - RNA, 22 nt, synthetic construct
  source 1..22: mol_type = other RNA
gctggggttcagagaggaggga

SEQ ID NO: 22244 - RNA, 22 nt, synthetic construct
  source 1..22: mol_type = other RNA
gctgggtttaaggcaggagggg

SEQ ID NO: 22245 - RNA, 22 nt, synthetic construct
  source 1..22: mol_type = other RNA
gctgggtttgggtcaggtctgg

SEQ ID NO: 22246 - RNA, 22 nt, synthetic construct
  source 1..22: mol_type = other RNA
gctggtaccctgcccccattcc

SEQ ID NO: 22247 - RNA, 22 nt, synthetic construct
  source 1..22: mol_type = other RNA
gctggtcaccccacacccagac

SEQ ID NO: 22248 - RNA, 22 nt, synthetic construct
  source 1..22: mol_type = other RNA
gctgtcacactccagttcactg

SEQ ID NO: 22249 - RNA, 22 nt, synthetic construct
  source 1..22: mol_type = other RNA
gctgtcctgggcaaacagcata

SEQ ID NO: 22250 - RNA, 22 nt, synthetic construct
  source 1..22: mol_type = other RNA
gctgtctcacccctctgggagt

SEQ ID NO: 22251 - RNA, 22 nt, synthetic construct
  source 1..22: mol_type = other RNA
gctgtgaaggggccgcacgtgc

SEQ ID NO: 22252 - RNA, 22 nt, synthetic construct
  source 1..22: mol_type = other RNA
gctgtggctgttcccaagttct

SEQ ID NO: 22253 - RNA, 22 nt, synthetic construct
  source 1..22: mol_type = other RNA
gctgtggtgaggaggggggtgt

SEQ ID NO: 22254 - RNA, 22 nt, synthetic construct
  source 1..22: mol_type = other RNA
gctgtgtttctcgtcctgcatc

SEQ ID NO: 22255 - RNA, 22 nt, synthetic construct
  source 1..22: mol_type = other RNA
gctgttcccaagttcttagggt

SEQ ID NO: 22256 - RNA, 22 nt, synthetic construct
  source 1..22: mol_type = other RNA
gctgttgggtcattttccccac

SEQ ID NO: 22257 - RNA, 22 nt, synthetic construct
  source 1..22: mol_type = other RNA
gctgtttaagatacgcctggtt

SEQ ID NO: 22258 - RNA, 22 nt, synthetic construct
  source 1..22: mol_type = other RNA
gctgtttgcccaggacagccta

SEQ ID NO: 22259 - RNA, 22 nt, synthetic construct
  source 1..22: mol_type = other RNA
gcttatgctgtttgcccaggac

SEQ ID NO: 22260 - RNA, 22 nt, synthetic construct
  source 1..22: mol_type = other RNA
gcttcactccttcctcagctcc

SEQ ID NO: 22261 - RNA, 22 nt, synthetic construct
  source 1..22: mol_type = other RNA
gcttccagtgctcagactaggg

SEQ ID NO: 22262 - RNA, 22 nt, synthetic construct
  source 1..22: mol_type = other RNA
gcttccctaaggccctgctctg

SEQ ID NO: 22263 - RNA, 22 nt, synthetic construct
  source 1..22: mol_type = other RNA
gcttccctgtcccccttcctcg

SEQ ID NO: 22264 - RNA, 22 nt, synthetic construct
  source 1..22: mol_type = other RNA
gcttccttacacttcccaagag

SEQ ID NO: 22265 - RNA, 22 nt, synthetic construct
  source 1..22: mol_type = other RNA
gcttcgttcctgcagagtatct

SEQ ID NO: 22266 - RNA, 22 nt, synthetic construct
  source 1..22: mol_type = other RNA
gcttctcatctgggtgcgggaa

SEQ ID NO: 22267 - RNA, 22 nt, synthetic construct
  source 1..22: mol_type = other RNA
gcttctcctcttgggaagtgta

SEQ ID NO: 22268 - RNA, 22 nt, synthetic construct
  source 1..22: mol_type = other RNA
gcttctgggtttgagtccttgg

SEQ ID NO: 22269 - RNA, 22 nt, synthetic construct
  source 1..22: mol_type = other RNA
gcttcttggccacgtaacctga

SEQ ID NO: 22270 - RNA, 22 nt, synthetic construct
  source 1..22: mol_type = other RNA
gcttgacccttggaaggacctg

SEQ ID NO: 22271 - RNA, 22 nt, synthetic construct
  source 1..22: mol_type = other RNA
gcttgccaaggactcaaaccca

SEQ ID NO: 22272 - RNA, 22 nt, synthetic construct
  source 1..22: mol_type = other RNA
gcttggcaaactcactcttcgg

SEQ ID NO: 22273 - RNA, 22 nt, synthetic construct
  source 1..22: mol_type = other RNA
gcttggggacctgcctggagaa

SEQ ID NO: 22274 - RNA, 22 nt, synthetic construct
  source 1..22: mol_type = other RNA
gctttggagaggtgagggactt

SEQ ID NO: 22275 - RNA, 22 nt, synthetic construct
  source 1..22: mol_type = other RNA
gcttttgtccccccaagttttg

SEQ ID NO: 22276 - RNA, 22 nt, synthetic construct
  source 1..22: mol_type = other RNA
ggaaaaacaaaatcagaataag

SEQ ID NO: 22277 - RNA, 22 nt, synthetic construct
  source 1..22: mol_type = other RNA
ggaaaacagggatggttggtca

SEQ ID NO: 22278 - RNA, 22 nt, synthetic construct
  source 1..22: mol_type = other RNA
ggaaaactccctttgtgagaat

SEQ ID NO: 22279 - RNA, 22 nt, synthetic construct
  source 1..22: mol_type = other RNA
ggaaaatgacccaacagcctct

SEQ ID NO: 22280 - RNA, 22 nt, synthetic construct
  source 1..22: mol_type = other RNA
ggaaaccaccccagcagatact

SEQ ID NO: 22281 - RNA, 22 nt, synthetic construct
  source 1..22: mol_type = other RNA
ggaaaccacgaaaggactcctg

SEQ ID NO: 22282 - RNA, 22 nt, synthetic construct
  source 1..22: mol_type = other RNA
ggaaactcgggctgtgaagggg

SEQ ID NO: 22283 - RNA, 22 nt, synthetic construct
  source 1..22: mol_type = other RNA
ggaaagaaggatggagaaagag

SEQ ID NO: 22284 - RNA, 22 nt, synthetic construct
  source 1..22: mol_type = other RNA
ggaaaggcccattgctctcctt

SEQ ID NO: 22285 - RNA, 22 nt, synthetic construct
  source 1..22: mol_type = other RNA
ggaaataaacgagccgagttca

SEQ ID NO: 22286 - RNA, 22 nt, synthetic construct
  source 1..22: mol_type = other RNA
ggaacaatataaattggggact

SEQ ID NO: 22287 - RNA, 22 nt, synthetic construct
  source 1..22: mol_type = other RNA
ggaacagccacagcaggggggc

SEQ ID NO: 22288 - RNA, 22 nt, synthetic construct
  source 1..22: mol_type = other RNA
ggaaccccacatggtacctgtt

SEQ ID NO: 22289 - RNA, 22 nt, synthetic construct
  source 1..22: mol_type = other RNA
ggaacccctgtagggaaggggc

SEQ ID NO: 22290 - RNA, 22 nt, synthetic construct
  source 1..22: mol_type = other RNA
ggaacctcttccctagtctgag

SEQ ID NO: 22291 - RNA, 22 nt, synthetic construct
  source 1..22: mol_type = other RNA
ggaacgaagccgtgggcccagg

SEQ ID NO: 22292 - RNA, 22 nt, synthetic construct
  source 1..22: mol_type = other RNA
ggaacgggatgaactcggctcg

SEQ ID NO: 22293 - RNA, 22 nt, synthetic construct
  source 1..22: mol_type = other RNA
ggaacggggatgcaggggaacg

SEQ ID NO: 22294 - RNA, 22 nt, synthetic construct
  source 1..22: mol_type = other RNA
ggaacggggctcagtctgaaga

SEQ ID NO: 22295 - RNA, 22 nt, synthetic construct
  source 1..22: mol_type = other RNA
ggaagaatgagaaacggtggcc

SEQ ID NO: 22296 - RNA, 22 nt, synthetic construct
  source 1..22: mol_type = other RNA
ggaagaggttccagcccctcct

SEQ ID NO: 22297 - RNA, 22 nt, synthetic construct
  source 1..22: mol_type = other RNA
ggaagcctgagcgcctctcctg

SEQ ID NO: 22298 - RNA, 22 nt, synthetic construct
  source 1..22: mol_type = other RNA
ggaagcgccacctgtgggtggt

SEQ ID NO: 22299 - RNA, 22 nt, synthetic construct
  source 1..22: mol_type = other RNA
ggaagcgggaccctgctctggg

SEQ ID NO: 22300 - RNA, 22 nt, synthetic construct
  source 1..22: mol_type = other RNA
ggaagctgcagcaccaggatca

SEQ ID NO: 22301 - RNA, 22 nt, synthetic construct
  source 1..22: mol_type = other RNA
ggaaggacctggctgggtttaa

SEQ ID NO: 22302 - RNA, 22 nt, synthetic construct
  source 1..22: mol_type = other RNA
ggaaggagtgaagctaaactcc

SEQ ID NO: 22303 - RNA, 22 nt, synthetic construct
  source 1..22: mol_type = other RNA
ggaaggccaccctgtgctggga

SEQ ID NO: 22304 - RNA, 22 nt, synthetic construct
  source 1..22: mol_type = other RNA
ggaagggagggggcttctcatc

SEQ ID NO: 22305 - RNA, 22 nt, synthetic construct
  source 1..22: mol_type = other RNA
ggaagggctggggcctggcctc

SEQ ID NO: 22306 - RNA, 22 nt, synthetic construct
  source 1..22: mol_type = other RNA
ggaaggggcaggagagccaggg

SEQ ID NO: 22307 - RNA, 22 nt, synthetic construct
  source 1..22: mol_type = other RNA
ggaagggggacagggaagcctg

SEQ ID NO: 22308 - RNA, 22 nt, synthetic construct
  source 1..22: mol_type = other RNA
ggaagggggatgcaggggaacg

SEQ ID NO: 22309 - RNA, 22 nt, synthetic construct
  source 1..22: mol_type = other RNA
ggaagtgaacggggaagggagg

SEQ ID NO: 22310 - RNA, 22 nt, synthetic construct
  source 1..22: mol_type = other RNA
ggaagtgtaaggaagctgcagc

SEQ ID NO: 22311 - RNA, 22 nt, synthetic construct
  source 1..22: mol_type = other RNA
ggaatatgtcccagatagcact

SEQ ID NO: 22312 - RNA, 22 nt, synthetic construct
  source 1..22: mol_type = other RNA
ggaatcaagagtcacccagaga

SEQ ID NO: 22313 - RNA, 22 nt, synthetic construct
  source 1..22: mol_type = other RNA
ggaatccctcctctctgaaccc

SEQ ID NO: 22314 - RNA, 22 nt, synthetic construct
  source 1..22: mol_type = other RNA
ggaatgggggcagggtaccagc

SEQ ID NO: 22315 - RNA, 22 nt, synthetic construct
  source 1..22: mol_type = other RNA
ggacaaaagccgaagtccaggg

SEQ ID NO: 22316 - RNA, 22 nt, synthetic construct
  source 1..22: mol_type = other RNA
ggacacccccctcctcaccaca

SEQ ID NO: 22317 - RNA, 22 nt, synthetic construct
  source 1..22: mol_type = other RNA
ggacacggtgctaggacagtgg

SEQ ID NO: 22318 - RNA, 22 nt, synthetic construct
  source 1..22: mol_type = other RNA
ggacactgggtgggctccggga

SEQ ID NO: 22319 - RNA, 22 nt, synthetic construct
  source 1..22: mol_type = other RNA
ggacagactcaggggcctgggc

SEQ ID NO: 22320 - RNA, 22 nt, synthetic construct
  source 1..22: mol_type = other RNA
ggacagcctagttttagcactg

SEQ ID NO: 22321 - RNA, 22 nt, synthetic construct
  source 1..22: mol_type = other RNA
ggacagggaagcctgagcgcct

SEQ ID NO: 22322 - RNA, 22 nt, synthetic construct
  source 1..22: mol_type = other RNA
ggacagtggggaaaatgaccca

SEQ ID NO: 22323 - RNA, 22 nt, synthetic construct
  source 1..22: mol_type = other RNA
ggacatattcctccgcccagag

SEQ ID NO: 22324 - RNA, 22 nt, synthetic construct
  source 1..22: mol_type = other RNA
ggaccaacttattctgattttg

SEQ ID NO: 22325 - RNA, 22 nt, synthetic construct
  source 1..22: mol_type = other RNA
ggacccaggagtccaggccccc

SEQ ID NO: 22326 - RNA, 22 nt, synthetic construct
  source 1..22: mol_type = other RNA
ggaccccacgagaggccacccc

SEQ ID NO: 22327 - RNA, 22 nt, synthetic construct
  source 1..22: mol_type = other RNA
ggacccctaagggaagaatgag

SEQ ID NO: 22328 - RNA, 22 nt, synthetic construct
  source 1..22: mol_type = other RNA
ggacccctgggtctgaatgggg

SEQ ID NO: 22329 - RNA, 22 nt, synthetic construct
  source 1..22: mol_type = other RNA
ggaccctgctctgggcggagga

SEQ ID NO: 22330 - RNA, 22 nt, synthetic construct
  source 1..22: mol_type = other RNA
ggacctgaactggagctgagga

SEQ ID NO: 22331 - RNA, 22 nt, synthetic construct
  source 1..22: mol_type = other RNA
ggacctgcccagtacaggcatc

SEQ ID NO: 22332 - RNA, 22 nt, synthetic construct
  source 1..22: mol_type = other RNA
ggacctgcctggagaaggatgc

SEQ ID NO: 22333 - RNA, 22 nt, synthetic construct
  source 1..22: mol_type = other RNA
ggacctggctgggtttaaggca

SEQ ID NO: 22334 - RNA, 22 nt, synthetic construct
  source 1..22: mol_type = other RNA
ggacgagaaacacagccccagg

SEQ ID NO: 22335 - RNA, 22 nt, synthetic construct
  source 1..22: mol_type = other RNA
ggacgaggaagggggacaggga

SEQ ID NO: 22336 - RNA, 22 nt, synthetic construct
  source 1..22: mol_type = other RNA
ggacgcaccattctcacaaagg

SEQ ID NO: 22337 - RNA, 22 nt, synthetic construct
  source 1..22: mol_type = other RNA
ggacggggctggctactggcct

SEQ ID NO: 22338 - RNA, 22 nt, synthetic construct
  source 1..22: mol_type = other RNA
ggactagaaaggtgaagagcca

SEQ ID NO: 22339 - RNA, 22 nt, synthetic construct
  source 1..22: mol_type = other RNA
ggactcaaacccagaagcccag

SEQ ID NO: 22340 - RNA, 22 nt, synthetic construct
  source 1..22: mol_type = other RNA
ggactccagagggagccacgaa

SEQ ID NO: 22341 - RNA, 22 nt, synthetic construct
  source 1..22: mol_type = other RNA
ggactccagagtccaggcccaa

SEQ ID NO: 22342 - RNA, 22 nt, synthetic construct
  source 1..22: mol_type = other RNA
ggactcccagaggggtgagaca

SEQ ID NO: 22343 - RNA, 22 nt, synthetic construct
  source 1..22: mol_type = other RNA
ggactcctggctatctgcaaac

SEQ ID NO: 22344 - RNA, 22 nt, synthetic construct
  source 1..22: mol_type = other RNA
ggactcctggctctgaaggagg

SEQ ID NO: 22345 - RNA, 22 nt, synthetic construct
  source 1..22: mol_type = other RNA
ggactcctgggtctgagggtgg

SEQ ID NO: 22346 - RNA, 22 nt, synthetic construct
  source 1..22: mol_type = other RNA
ggactccttcatctgagggcgg

SEQ ID NO: 22347 - RNA, 22 nt, synthetic construct
  source 1..22: mol_type = other RNA
ggactcgtgggtctgagggagg

SEQ ID NO: 22348 - RNA, 22 nt, synthetic construct
  source 1..22: mol_type = other RNA
ggactctggagtccctggtgcc

SEQ ID NO: 22349 - RNA, 22 nt, synthetic construct
  source 1..22: mol_type = other RNA
ggactctttaaggaaagaagga

SEQ ID NO: 22350 - RNA, 22 nt, synthetic construct
  source 1..22: mol_type = other RNA
ggactgagggtttcagtgctaa

SEQ ID NO: 22351 - RNA, 22 nt, synthetic construct
  source 1..22: mol_type = other RNA
ggactgggggcctggactcctg

SEQ ID NO: 22352 - RNA, 22 nt, synthetic construct
  source 1..22: mol_type = other RNA
ggacttcggcttttgtcccccc

SEQ ID NO: 22353 - RNA, 22 nt, synthetic construct
  source 1..22: mol_type = other RNA
ggacttctgggtcttagggagg

SEQ ID NO: 22354 - RNA, 22 nt, synthetic construct
  source 1..22: mol_type = other RNA
ggacttgccccaggccttgtgg

SEQ ID NO: 22355 - RNA, 22 nt, synthetic construct
  source 1..22: mol_type = other RNA
ggacttggggggtaatttatcc

SEQ ID NO: 22356 - RNA, 22 nt, synthetic construct
  source 1..22: mol_type = other RNA
ggagaaactggccgggaatcaa

SEQ ID NO: 22357 - RNA, 22 nt, synthetic construct
  source 1..22: mol_type = other RNA
ggagaaagagaaagggagtaga

SEQ ID NO: 22358 - RNA, 22 nt, synthetic construct
  source 1..22: mol_type = other RNA
ggagaagcagtttggaaaaaca

SEQ ID NO: 22359 - RNA, 22 nt, synthetic construct
  source 1..22: mol_type = other RNA
ggagaaggatgcaggacgagaa

SEQ ID NO: 22360 - RNA, 22 nt, synthetic construct
  source 1..22: mol_type = other RNA
ggagaatccacccaaaaggcag

SEQ ID NO: 22361 - RNA, 22 nt, synthetic construct
  source 1..22: mol_type = other RNA
ggagagcaatgggcctttccct

SEQ ID NO: 22362 - RNA, 22 nt, synthetic construct
  source 1..22: mol_type = other RNA
ggagagccaggggcatgagatg

SEQ ID NO: 22363 - RNA, 22 nt, synthetic construct
  source 1..22: mol_type = other RNA
ggagaggcgctcaggcttccct

SEQ ID NO: 22364 - RNA, 22 nt, synthetic construct
  source 1..22: mol_type = other RNA
ggagaggctgggggcctggact

SEQ ID NO: 22365 - RNA, 22 nt, synthetic construct
  source 1..22: mol_type = other RNA
ggagagggtagcgcagggtggc

SEQ ID NO: 22366 - RNA, 22 nt, synthetic construct
  source 1..22: mol_type = other RNA
ggagaggtgagggacttggggg

SEQ ID NO: 22367 - RNA, 22 nt, synthetic construct
  source 1..22: mol_type = other RNA
ggagcattggggtgggctgggg

SEQ ID NO: 22368 - RNA, 22 nt, synthetic construct
  source 1..22: mol_type = other RNA
ggagccacgaaaacagatccag

SEQ ID NO: 22369 - RNA, 22 nt, synthetic construct
  source 1..22: mol_type = other RNA
ggagccaggattcttagggctg

SEQ ID NO: 22370 - RNA, 22 nt, synthetic construct
  source 1..22: mol_type = other RNA
ggagcccacccagtgtccacaa

SEQ ID NO: 22371 - RNA, 22 nt, synthetic construct
  source 1..22: mol_type = other RNA
ggagcccaggcccccagctctt

SEQ ID NO: 22372 - RNA, 22 nt, synthetic construct
  source 1..22: mol_type = other RNA
ggagctacgagggccaagagca

SEQ ID NO: 22373 - RNA, 22 nt, synthetic construct
  source 1..22: mol_type = other RNA
ggagctgaggaaggagtgaagc

SEQ ID NO: 22374 - RNA, 22 nt, synthetic construct
  source 1..22: mol_type = other RNA
ggagctgggtttgggtcaggtc

SEQ ID NO: 22375 - RNA, 22 nt, synthetic construct
  source 1..22: mol_type = other RNA
ggaggaacaatataaattgggg

SEQ ID NO: 22376 - RNA, 22 nt, synthetic construct
  source 1..22: mol_type = other RNA
ggaggaaggccaccctgtgctg

SEQ ID NO: 22377 - RNA, 22 nt, synthetic construct
  source 1..22: mol_type = other RNA
ggaggaatatgtcccagatagc

SEQ ID NO: 22378 - RNA, 22 nt, synthetic construct
  source 1..22: mol_type = other RNA
ggaggagaatccacccaaaagg

SEQ ID NO: 22379 - RNA, 22 nt, synthetic construct
  source 1..22: mol_type = other RNA
ggaggaggcgggagggagctac

SEQ ID NO: 22380 - RNA, 22 nt, synthetic construct
  source 1..22: mol_type = other RNA
ggaggagggacttgccccaggc

SEQ ID NO: 22381 - RNA, 22 nt, synthetic construct
  source 1..22: mol_type = other RNA
ggaggaggggctggaacctctt

SEQ ID NO: 22382 - RNA, 22 nt, synthetic construct
  source 1..22: mol_type = other RNA
ggaggaggggctggggcctgga

SEQ ID NO: 22383 - RNA, 22 nt, synthetic construct
  source 1..22: mol_type = other RNA
ggaggccaggccccagcccttc

SEQ ID NO: 22384 - RNA, 22 nt, synthetic construct
  source 1..22: mol_type = other RNA
ggaggcctggagcattggggtg

SEQ ID NO: 22385 - RNA, 22 nt, synthetic construct
  source 1..22: mol_type = other RNA
ggaggcgggagggagctacgag

SEQ ID NO: 22386 - RNA, 22 nt, synthetic construct
  source 1..22: mol_type = other RNA
ggaggcggggctgggcctggac

SEQ ID NO: 22387 - RNA, 22 nt, synthetic construct
  source 1..22: mol_type = other RNA
ggagggacttgccccaggcctt

SEQ ID NO: 22388 - RNA, 22 nt, synthetic construct
  source 1..22: mol_type = other RNA
ggagggagctacgagggccaag

SEQ ID NO: 22389 - RNA, 22 nt, synthetic construct
  source 1..22: mol_type = other RNA
ggagggattcccttctcaggtt

SEQ ID NO: 22390 - RNA, 22 nt, synthetic construct
  source 1..22: mol_type = other RNA
ggaggggctggaacctcttccc

SEQ ID NO: 22391 - RNA, 22 nt, synthetic construct
  source 1..22: mol_type = other RNA
ggaggggctggagccaggattc

SEQ ID NO: 22392 - RNA, 22 nt, synthetic construct
  source 1..22: mol_type = other RNA
ggaggggctggggcctggactc

SEQ ID NO: 22393 - RNA, 22 nt, synthetic construct
  source 1..22: mol_type = other RNA
ggaggggctgggggccaggact

SEQ ID NO: 22394 - RNA, 22 nt, synthetic construct
  source 1..22: mol_type = other RNA
ggagggggcttctcatctgggt

SEQ ID NO: 22395 - RNA, 22 nt, synthetic construct
  source 1..22: mol_type = other RNA
ggaggggggcaaggagagcaat

SEQ ID NO: 22396 - RNA, 22 nt, synthetic construct
  source 1..22: mol_type = other RNA
ggaggggggtgtccgtgtggaa

SEQ ID NO: 22397 - RNA, 22 nt, synthetic construct
  source 1..22: mol_type = other RNA
ggaggggttgggcctggactct

SEQ ID NO: 22398 - RNA, 22 nt, synthetic construct
  source 1..22: mol_type = other RNA
ggagtagaggcggccacgacct

SEQ ID NO: 22399 - RNA, 22 nt, synthetic construct
  source 1..22: mol_type = other RNA
ggagtccaggccccagcccctc

SEQ ID NO: 22400 - RNA, 22 nt, synthetic construct
  source 1..22: mol_type = other RNA
ggagtccaggcccccagcctct

SEQ ID NO: 22401 - RNA, 22 nt, synthetic construct
  source 1..22: mol_type = other RNA
ggagtccaggcccccagtccct

SEQ ID NO: 22402 - RNA, 22 nt, synthetic construct
  source 1..22: mol_type = other RNA
ggagtcccgacttgctgggaca

SEQ ID NO: 22403 - RNA, 22 nt, synthetic construct
  source 1..22: mol_type = other RNA
ggagtcccgcccaggcccctga

SEQ ID NO: 22404 - RNA, 22 nt, synthetic construct
  source 1..22: mol_type = other RNA
ggagtccctggtgcccaggcct

SEQ ID NO: 22405 - RNA, 22 nt, synthetic construct
  source 1..22: mol_type = other RNA
ggagtcctggcccccagcccct

SEQ ID NO: 22406 - RNA, 22 nt, synthetic construct
  source 1..22: mol_type = other RNA
ggagtcctttcgtggtttccac

SEQ ID NO: 22407 - RNA, 22 nt, synthetic construct
  source 1..22: mol_type = other RNA
ggagtgaagctaaactcctaga

SEQ ID NO: 22408 - RNA, 22 nt, synthetic construct
  source 1..22: mol_type = other RNA
ggagtgtgacagcctggggccc

SEQ ID NO: 22409 - RNA, 22 nt, synthetic construct
  source 1..22: mol_type = other RNA
ggagtttagcttcactccttcc

SEQ ID NO: 22410 - RNA, 22 nt, synthetic construct
  source 1..22: mol_type = other RNA
ggagttttccacacggacaccc

SEQ ID NO: 22411 - RNA, 22 nt, synthetic construct
  source 1..22: mol_type = other RNA
ggataaattaccccccaagtcc

SEQ ID NO: 22412 - RNA, 22 nt, synthetic construct
  source 1..22: mol_type = other RNA
ggataccccgaagagtgagttt

SEQ ID NO: 22413 - RNA, 22 nt, synthetic construct
  source 1..22: mol_type = other RNA
ggatcagtgaaacgcaccagac

SEQ ID NO: 22414 - RNA, 22 nt, synthetic construct
  source 1..22: mol_type = other RNA
ggatctaggagtttagcttcac

SEQ ID NO: 22415 - RNA, 22 nt, synthetic construct
  source 1..22: mol_type = other RNA
ggatctgttttcgtggctccct

SEQ ID NO: 22416 - RNA, 22 nt, synthetic construct
  source 1..22: mol_type = other RNA
ggatgaactcggctcgtttatt

SEQ ID NO: 22417 - RNA, 22 nt, synthetic construct
  source 1..22: mol_type = other RNA
ggatgcaggacgagaaacacag

SEQ ID NO: 22418 - RNA, 22 nt, synthetic construct
  source 1..22: mol_type = other RNA
ggatgcaggggaacggggatgc

SEQ ID NO: 22419 - RNA, 22 nt, synthetic construct
  source 1..22: mol_type = other RNA
ggatgcaggggaacggggctca

SEQ ID NO: 22420 - RNA, 22 nt, synthetic construct
  source 1..22: mol_type = other RNA
ggatgcaggggaagggggatgc

SEQ ID NO: 22421 - RNA, 22 nt, synthetic construct
  source 1..22: mol_type = other RNA
ggatgcctgtactgggcaggtc

SEQ ID NO: 22422 - RNA, 22 nt, synthetic construct
  source 1..22: mol_type = other RNA
ggatgcgtgacctgcccggttc

SEQ ID NO: 22423 - RNA, 22 nt, synthetic construct
  source 1..22: mol_type = other RNA
ggatggagaaagagaaagggag

SEQ ID NO: 22424 - RNA, 22 nt, synthetic construct
  source 1..22: mol_type = other RNA
ggatggttggtcactgtctctg

SEQ ID NO: 22425 - RNA, 22 nt, synthetic construct
  source 1..22: mol_type = other RNA
ggattcccttctcaggttacgt

SEQ ID NO: 22426 - RNA, 22 nt, synthetic construct
  source 1..22: mol_type = other RNA
ggattctcctccaactgtgggg

SEQ ID NO: 22427 - RNA, 22 nt, synthetic construct
  source 1..22: mol_type = other RNA
ggattcttagggctgaacagag

SEQ ID NO: 22428 - RNA, 22 nt, synthetic construct
  source 1..22: mol_type = other RNA
ggcaaaacccccgtcaccaccc

SEQ ID NO: 22429 - RNA, 22 nt, synthetic construct
  source 1..22: mol_type = other RNA
ggcaaacagcataagctggtca

SEQ ID NO: 22430 - RNA, 22 nt, synthetic construct
  source 1..22: mol_type = other RNA
ggcaaactcactcttcggggta

SEQ ID NO: 22431 - RNA, 22 nt, synthetic construct
  source 1..22: mol_type = other RNA
ggcaaccaggcgtatcttaaac

SEQ ID NO: 22432 - RNA, 22 nt, synthetic construct
  source 1..22: mol_type = other RNA
ggcaagcccaggagaggcgctc

SEQ ID NO: 22433 - RNA, 22 nt, synthetic construct
  source 1..22: mol_type = other RNA
ggcaaggagagcaatgggcctt

SEQ ID NO: 22434 - RNA, 22 nt, synthetic construct
  source 1..22: mol_type = other RNA
ggcaagtccctcctccgacccc

SEQ ID NO: 22435 - RNA, 22 nt, synthetic construct
  source 1..22: mol_type = other RNA
ggcaattggggtgcaggaatgg

SEQ ID NO: 22436 - RNA, 22 nt, synthetic construct
  source 1..22: mol_type = other RNA
ggcacacaggtgtgcagctgtc

SEQ ID NO: 22437 - RNA, 22 nt, synthetic construct
  source 1..22: mol_type = other RNA
ggcaccagggactccagagtcc

SEQ ID NO: 22438 - RNA, 22 nt, synthetic construct
  source 1..22: mol_type = other RNA
ggcacgtgcggccccttcacag

SEQ ID NO: 22439 - RNA, 22 nt, synthetic construct
  source 1..22: mol_type = other RNA
ggcagcctggtagacagggctg

SEQ ID NO: 22440 - RNA, 22 nt, synthetic construct
  source 1..22: mol_type = other RNA
ggcagctttggagaggtgaggg

SEQ ID NO: 22441 - RNA, 22 nt, synthetic construct
  source 1..22: mol_type = other RNA
ggcaggagagccaggggcatga

SEQ ID NO: 22442 - RNA, 22 nt, synthetic construct
  source 1..22: mol_type = other RNA
ggcaggaggggctgggggccag

SEQ ID NO: 22443 - RNA, 22 nt, synthetic construct
  source 1..22: mol_type = other RNA
ggcagggctgtggtgaggaggg

SEQ ID NO: 22444 - RNA, 22 nt, synthetic construct
  source 1..22: mol_type = other RNA
ggcagggtaccagcctcaccaa

SEQ ID NO: 22445 - RNA, 22 nt, synthetic construct
  source 1..22: mol_type = other RNA
ggcaggtccccaagcatcgccc

SEQ ID NO: 22446 - RNA, 22 nt, synthetic construct
  source 1..22: mol_type = other RNA
ggcaggtccttgaaagggaaag

SEQ ID NO: 22447 - RNA, 22 nt, synthetic construct
  source 1..22: mol_type = other RNA
ggcatccctgtgaaagatgcct

SEQ ID NO: 22448 - RNA, 22 nt, synthetic construct
  source 1..22: mol_type = other RNA
ggcatctttcacagggatgcct

SEQ ID NO: 22449 - RNA, 22 nt, synthetic construct
  source 1..22: mol_type = other RNA
ggcatgagatggtggacgagga

SEQ ID NO: 22450 - RNA, 22 nt, synthetic construct
  source 1..22: mol_type = other RNA
ggccaagaagcaggggagctgg

SEQ ID NO: 22451 - RNA, 22 nt, synthetic construct
  source 1..22: mol_type = other RNA
ggccaagagcatgaggtcatgg

SEQ ID NO: 22452 - RNA, 22 nt, synthetic construct
  source 1..22: mol_type = other RNA
ggccaagtaggtggcctggggc

SEQ ID NO: 22453 - RNA, 22 nt, synthetic construct
  source 1..22: mol_type = other RNA
ggccaccccagccctgtctacc

SEQ ID NO: 22454 - RNA, 22 nt, synthetic construct
  source 1..22: mol_type = other RNA
ggccaccctgcgctaccctctc

SEQ ID NO: 22455 - RNA, 22 nt, synthetic construct
  source 1..22: mol_type = other RNA
ggccaccctgtgctgggacaga

SEQ ID NO: 22456 - RNA, 22 nt, synthetic construct
  source 1..22: mol_type = other RNA
ggccaccgtttctcattcttcc

SEQ ID NO: 22457 - RNA, 22 nt, synthetic construct
  source 1..22: mol_type = other RNA
ggccacctacttggcctggacc

SEQ ID NO: 22458 - RNA, 22 nt, synthetic construct
  source 1..22: mol_type = other RNA
ggccacgacctggtgaacacct

SEQ ID NO: 22459 - RNA, 22 nt, synthetic construct
  source 1..22: mol_type = other RNA
ggccacgtaacctgagaaggga

SEQ ID NO: 22460 - RNA, 22 nt, synthetic construct
  source 1..22: mol_type = other RNA
ggccactgagaaccgggcaggt

SEQ ID NO: 22461 - RNA, 22 nt, synthetic construct
  source 1..22: mol_type = other RNA
ggccactggctgtttaagatac

SEQ ID NO: 22462 - RNA, 22 nt, synthetic construct
  source 1..22: mol_type = other RNA
ggccagaggctgttgggtcatt

SEQ ID NO: 22463 - RNA, 22 nt, synthetic construct
  source 1..22: mol_type = other RNA
ggccaggactcctggctctgaa

SEQ ID NO: 22464 - RNA, 22 nt, synthetic construct
  source 1..22: mol_type = other RNA
ggccaggccccagcccttccgc

SEQ ID NO: 22465 - RNA, 22 nt, synthetic construct
  source 1..22: mol_type = other RNA
ggccaggccttcagtgctcagt

SEQ ID NO: 22466 - RNA, 22 nt, synthetic construct
  source 1..22: mol_type = other RNA
ggccagtagccagccccgtcct

SEQ ID NO: 22467 - RNA, 22 nt, synthetic construct
  source 1..22: mol_type = other RNA
ggccagtttctccacctggggc

SEQ ID NO: 22468 - RNA, 22 nt, synthetic construct
  source 1..22: mol_type = other RNA
ggcccaacccctccccattcaa

SEQ ID NO: 22469 - RNA, 22 nt, synthetic construct
  source 1..22: mol_type = other RNA
ggcccacggcttcgttcctgca

SEQ ID NO: 22470 - RNA, 22 nt, synthetic construct
  source 1..22: mol_type = other RNA
ggcccagccccgcctccctaag

SEQ ID NO: 22471 - RNA, 22 nt, synthetic construct
  source 1..22: mol_type = other RNA
ggcccaggcacacaggtgtgca

SEQ ID NO: 22472 - RNA, 22 nt, synthetic construct
  source 1..22: mol_type = other RNA
ggcccagggctatgcagggtgg

SEQ ID NO: 22473 - RNA, 22 nt, synthetic construct
  source 1..22: mol_type = other RNA
ggcccattgctctccttgcccc

SEQ ID NO: 22474 - RNA, 22 nt, synthetic construct
  source 1..22: mol_type = other RNA
ggccccagcccctcctctctca

SEQ ID NO: 22475 - RNA, 22 nt, synthetic construct
  source 1..22: mol_type = other RNA
ggccccagcccttccgccctca

SEQ ID NO: 22476 - RNA, 22 nt, synthetic construct
  source 1..22: mol_type = other RNA
ggccccaggccacctacttggc

SEQ ID NO: 22477 - RNA, 22 nt, synthetic construct
  source 1..22: mol_type = other RNA
ggccccaggctgtcacactcca

SEQ ID NO: 22478 - RNA, 22 nt, synthetic construct
  source 1..22: mol_type = other RNA
ggcccccagcccctcctgcctt

SEQ ID NO: 22479 - RNA, 22 nt, synthetic construct
  source 1..22: mol_type = other RNA
ggcccccagcctctccccattc

SEQ ID NO: 22480 - RNA, 22 nt, synthetic construct
  source 1..22: mol_type = other RNA
ggcccccagctcttctctgttc

SEQ ID NO: 22481 - RNA, 22 nt, synthetic construct
  source 1..22: mol_type = other RNA
ggcccccagtccctccaccctc

SEQ ID NO: 22482 - RNA, 22 nt, synthetic construct
  source 1..22: mol_type = other RNA
ggccccctctgcacggggccct

SEQ ID NO: 22483 - RNA, 22 nt, synthetic construct
  source 1..22: mol_type = other RNA
ggccccgtgcagagggggcctc

SEQ ID NO: 22484 - RNA, 22 nt, synthetic construct
  source 1..22: mol_type = other RNA
ggcccctgagtctgtcccagca

SEQ ID NO: 22485 - RNA, 22 nt, synthetic construct
  source 1..22: mol_type = other RNA
ggccccttcacagcccgagttt

SEQ ID NO: 22486 - RNA, 22 nt, synthetic construct
  source 1..22: mol_type = other RNA
ggcccgtgtcagcccctggctg

SEQ ID NO: 22487 - RNA, 22 nt, synthetic construct
  source 1..22: mol_type = other RNA
ggccctcgtagctccctcccgc

SEQ ID NO: 22488 - RNA, 22 nt, synthetic construct
  source 1..22: mol_type = other RNA
ggccctgcagccaggggctgac

SEQ ID NO: 22489 - RNA, 22 nt, synthetic construct
  source 1..22: mol_type = other RNA
ggccctgctctgggcttctggg

SEQ ID NO: 22490 - RNA, 22 nt, synthetic construct
  source 1..22: mol_type = other RNA
ggccgcacgtgccctgggaacg

SEQ ID NO: 22491 - RNA, 22 nt, synthetic construct
  source 1..22: mol_type = other RNA
ggccgcctctactccctttctc

SEQ ID NO: 22492 - RNA, 22 nt, synthetic construct
  source 1..22: mol_type = other RNA
ggccgcgtcagagcagctcagg

SEQ ID NO: 22493 - RNA, 22 nt, synthetic construct
  source 1..22: mol_type = other RNA
ggccggccaggccttcagtgct

SEQ ID NO: 22494 - RNA, 22 nt, synthetic construct
  source 1..22: mol_type = other RNA
ggccggcctgaccactgggcaa

SEQ ID NO: 22495 - RNA, 22 nt, synthetic construct
  source 1..22: mol_type = other RNA
ggccgggaatcaagagtcaccc

SEQ ID NO: 22496 - RNA, 22 nt, synthetic construct
  source 1..22: mol_type = other RNA
ggccgtctggtgcgtttcactg

SEQ ID NO: 22497 - RNA, 22 nt, synthetic construct
  source 1..22: mol_type = other RNA
ggcctcaggcatctttcacagg

SEQ ID NO: 22498 - RNA, 22 nt, synthetic construct
  source 1..22: mol_type = other RNA
ggcctcagtgaactggagtgtg

SEQ ID NO: 22499 - RNA, 22 nt, synthetic construct
  source 1..22: mol_type = other RNA
ggcctcctgggataccccgaag

SEQ ID NO: 22500 - RNA, 22 nt, synthetic construct
  source 1..22: mol_type = other RNA
ggcctcctgggttgaatgggga

SEQ ID NO: 22501 - RNA, 22 nt, synthetic construct
  source 1..22: mol_type = other RNA
ggcctctcgtggggtccaggcc

SEQ ID NO: 22502 - RNA, 22 nt, synthetic construct
  source 1..22: mol_type = other RNA
ggcctctgggggatgcagggga

SEQ ID NO: 22503 - RNA, 22 nt, synthetic construct
  source 1..22: mol_type = other RNA
ggcctgaccactgggcaaccag

SEQ ID NO: 22504 - RNA, 22 nt, synthetic construct
  source 1..22: mol_type = other RNA
ggcctggaccccacgagaggcc

SEQ ID NO: 22505 - RNA, 22 nt, synthetic construct
  source 1..22: mol_type = other RNA
ggcctggacccctgggtctgaa

SEQ ID NO: 22506 - RNA, 22 nt, synthetic construct
  source 1..22: mol_type = other RNA
ggcctggactccttcatctgag

SEQ ID NO: 22507 - RNA, 22 nt, synthetic construct
  source 1..22: mol_type = other RNA
ggcctggactctggagtccctg

SEQ ID NO: 22508 - RNA, 22 nt, synthetic construct
  source 1..22: mol_type = other RNA
ggcctggacttctgggtcttag

SEQ ID NO: 22509 - RNA, 22 nt, synthetic construct
  source 1..22: mol_type = other RNA
ggcctggagcattggggtgggc

SEQ ID NO: 22510 - RNA, 22 nt, synthetic construct
  source 1..22: mol_type = other RNA
ggcctggccggcctgaccactg

SEQ ID NO: 22511 - RNA, 22 nt, synthetic construct
  source 1..22: mol_type = other RNA
ggcctggcctcctgggttgaat

SEQ ID NO: 22512 - RNA, 22 nt, synthetic construct
  source 1..22: mol_type = other RNA
ggcctgggcaccagggactcca

SEQ ID NO: 22513 - RNA, 22 nt, synthetic construct
  source 1..22: mol_type = other RNA
ggcctgggcgggactcccagag

SEQ ID NO: 22514 - RNA, 22 nt, synthetic construct
  source 1..22: mol_type = other RNA
ggcctgggctcctgggtttgag

SEQ ID NO: 22515 - RNA, 22 nt, synthetic construct
  source 1..22: mol_type = other RNA
ggcctggggcaagtccctcctc

SEQ ID NO: 22516 - RNA, 22 nt, synthetic construct
  source 1..22: mol_type = other RNA
ggcctggggcctctgggggatg

SEQ ID NO: 22517 - RNA, 22 nt, synthetic construct
  source 1..22: mol_type = other RNA
ggccttagggaagcgggaccct

SEQ ID NO: 22518 - RNA, 22 nt, synthetic construct
  source 1..22: mol_type = other RNA
ggccttatctcacaggtaaaac

SEQ ID NO: 22519 - RNA, 22 nt, synthetic construct
  source 1..22: mol_type = other RNA
ggccttcagtgctcagtggaaa

SEQ ID NO: 22520 - RNA, 22 nt, synthetic construct
  source 1..22: mol_type = other RNA
ggccttcctccaccctgcatag

SEQ ID NO: 22521 - RNA, 22 nt, synthetic construct
  source 1..22: mol_type = other RNA
ggccttgtggacactgggtggg

SEQ ID NO: 22522 - RNA, 22 nt, synthetic construct
  source 1..22: mol_type = other RNA
ggcctttccctttcaaggacct

SEQ ID NO: 22523 - RNA, 22 nt, synthetic construct
  source 1..22: mol_type = other RNA
ggcgataggggaggggggcaag

SEQ ID NO: 22524 - RNA, 22 nt, synthetic construct
  source 1..22: mol_type = other RNA
ggcgatgcttggggacctgcct

SEQ ID NO: 22525 - RNA, 22 nt, synthetic construct
  source 1..22: mol_type = other RNA
ggcgctcaggcttccctgtccc

SEQ ID NO: 22526 - RNA, 22 nt, synthetic construct
  source 1..22: mol_type = other RNA
ggcgcttccagtgctcagacta

SEQ ID NO: 22527 - RNA, 22 nt, synthetic construct
  source 1..22: mol_type = other RNA
ggcggaagggctggggcctggc

SEQ ID NO: 22528 - RNA, 22 nt, synthetic construct
  source 1..22: mol_type = other RNA
ggcggaggaatatgtcccagat

SEQ ID NO: 22529 - RNA, 22 nt, synthetic construct
  source 1..22: mol_type = other RNA
ggcggccacgacctggtgaaca

SEQ ID NO: 22530 - RNA, 22 nt, synthetic construct
  source 1..22: mol_type = other RNA
ggcgggactcccagaggggtga

SEQ ID NO: 22531 - RNA, 22 nt, synthetic construct
  source 1..22: mol_type = other RNA
ggcgggagggagctacgagggc

SEQ ID NO: 22532 - RNA, 22 nt, synthetic construct
  source 1..22: mol_type = other RNA
ggcggggctgggcctggacccc

SEQ ID NO: 22533 - RNA, 22 nt, synthetic construct
  source 1..22: mol_type = other RNA
ggcgtatcttaaacagccagtg

SEQ ID NO: 22534 - RNA, 22 nt, synthetic construct
  source 1..22: mol_type = other RNA
ggctactggccttatctcacag

SEQ ID NO: 22535 - RNA, 22 nt, synthetic construct
  source 1..22: mol_type = other RNA
ggctagagtaggaggggctgga

SEQ ID NO: 22536 - RNA, 22 nt, synthetic construct
  source 1..22: mol_type = other RNA
ggctagggggttgggggctaga

SEQ ID NO: 22537 - RNA, 22 nt, synthetic construct
  source 1..22: mol_type = other RNA
ggctatctgcaaacaggaagtg

SEQ ID NO: 22538 - RNA, 22 nt, synthetic construct
  source 1..22: mol_type = other RNA
ggctatgcagggtggaggaagg

SEQ ID NO: 22539 - RNA, 22 nt, synthetic construct
  source 1..22: mol_type = other RNA
ggctcagtctgaagagcagagc

SEQ ID NO: 22540 - RNA, 22 nt, synthetic construct
  source 1..22: mol_type = other RNA
ggctccagcccctcctactcta

SEQ ID NO: 22541 - RNA, 22 nt, synthetic construct
  source 1..22: mol_type = other RNA
ggctccctctggagtcccgact

SEQ ID NO: 22542 - RNA, 22 nt, synthetic construct
  source 1..22: mol_type = other RNA
ggctccgggacctgaactggag

SEQ ID NO: 22543 - RNA, 22 nt, synthetic construct
  source 1..22: mol_type = other RNA
ggctcctgggtttgagagagga

SEQ ID NO: 22544 - RNA, 22 nt, synthetic construct
  source 1..22: mol_type = other RNA
ggctcgtttatttccacccagt

SEQ ID NO: 22545 - RNA, 22 nt, synthetic construct
  source 1..22: mol_type = other RNA
ggctctcctgccccttccctac

SEQ ID NO: 22546 - RNA, 22 nt, synthetic construct
  source 1..22: mol_type = other RNA
ggctctgaaggaggaggggctg

SEQ ID NO: 22547 - RNA, 22 nt, synthetic construct
  source 1..22: mol_type = other RNA
ggctctgctcttcagactgagc

SEQ ID NO: 22548 - RNA, 22 nt, synthetic construct
  source 1..22: mol_type = other RNA
ggctcttcacctttctagtccc

SEQ ID NO: 22549 - RNA, 22 nt, synthetic construct
  source 1..22: mol_type = other RNA
ggctgaacagagaagagctggg

SEQ ID NO: 22550 - RNA, 22 nt, synthetic construct
  source 1..22: mol_type = other RNA
ggctgacacgggccaccgtttc

SEQ ID NO: 22551 - RNA, 22 nt, synthetic construct
  source 1..22: mol_type = other RNA
ggctgcagggccccgtgcagag

SEQ ID NO: 22552 - RNA, 22 nt, synthetic construct
  source 1..22: mol_type = other RNA
ggctgccttttgggtggattct

SEQ ID NO: 22553 - RNA, 22 nt, synthetic construct
  source 1..22: mol_type = other RNA
ggctggaacctcttccctagtc

SEQ ID NO: 22554 - RNA, 22 nt, synthetic construct
  source 1..22: mol_type = other RNA
ggctggagccaggattcttagg

SEQ ID NO: 22555 - RNA, 22 nt, synthetic construct
  source 1..22: mol_type = other RNA
ggctggctactggccttatctc

SEQ ID NO: 22556 - RNA, 22 nt, synthetic construct
  source 1..22: mol_type = other RNA
ggctgggcctggacccctgggt

SEQ ID NO: 22557 - RNA, 22 nt, synthetic construct
  source 1..22: mol_type = other RNA
ggctggggcctggactcctggg

SEQ ID NO: 22558 - RNA, 22 nt, synthetic construct
  source 1..22: mol_type = other RNA
ggctggggcctggactcgtggg

SEQ ID NO: 22559 - RNA, 22 nt, synthetic construct
  source 1..22: mol_type = other RNA
ggctggggcctggcctcctggg

SEQ ID NO: 22560 - RNA, 22 nt, synthetic construct
  source 1..22: mol_type = other RNA
ggctgggggccaggactcctgg

SEQ ID NO: 22561 - RNA, 22 nt, synthetic construct
  source 1..22: mol_type = other RNA
ggctgggggcctggactccttc

SEQ ID NO: 22562 - RNA, 22 nt, synthetic construct
  source 1..22: mol_type = other RNA
ggctgggggcctggacttctgg

SEQ ID NO: 22563 - RNA, 22 nt, synthetic construct
  source 1..22: mol_type = other RNA
ggctggggtggcctctcgtggg

SEQ ID NO: 22564 - RNA, 22 nt, synthetic construct
  source 1..22: mol_type = other RNA
ggctggggttcagagaggaggg

SEQ ID NO: 22565 - RNA, 22 nt, synthetic construct
  source 1..22: mol_type = other RNA
ggctgggtttaaggcaggaggg

SEQ ID NO: 22566 - RNA, 22 nt, synthetic construct
  source 1..22: mol_type = other RNA
ggctggtaccctgcccccattc

SEQ ID NO: 22567 - RNA, 22 nt, synthetic construct
  source 1..22: mol_type = other RNA
ggctgtcacactccagttcact

SEQ ID NO: 22568 - RNA, 22 nt, synthetic construct
  source 1..22: mol_type = other RNA
ggctgtcctgggcaaacagcat

SEQ ID NO: 22569 - RNA, 22 nt, synthetic construct
  source 1..22: mol_type = other RNA
ggctgtgaaggggccgcacgtg

SEQ ID NO: 22570 - RNA, 22 nt, synthetic construct
  source 1..22: mol_type = other RNA
ggctgtggtgaggaggggggtg

SEQ ID NO: 22571 - RNA, 22 nt, synthetic construct
  source 1..22: mol_type = other RNA
ggctgtgtttctcgtcctgcat

SEQ ID NO: 22572 - RNA, 22 nt, synthetic construct
  source 1..22: mol_type = other RNA
ggctgttcccaagttcttaggg

SEQ ID NO: 22573 - RNA, 22 nt, synthetic construct
  source 1..22: mol_type = other RNA
ggctgttgggtcattttcccca

SEQ ID NO: 22574 - RNA, 22 nt, synthetic construct
  source 1..22: mol_type = other RNA
ggctgtttaagatacgcctggt

SEQ ID NO: 22575 - RNA, 22 nt, synthetic construct
  source 1..22: mol_type = other RNA
ggcttccctgtcccccttcctc

SEQ ID NO: 22576 - RNA, 22 nt, synthetic construct
  source 1..22: mol_type = other RNA
ggcttcgttcctgcagagtatc

SEQ ID NO: 22577 - RNA, 22 nt, synthetic construct
  source 1..22: mol_type = other RNA
ggcttctcatctgggtgcggga

SEQ ID NO: 22578 - RNA, 22 nt, synthetic construct
  source 1..22: mol_type = other RNA
ggcttctgggtttgagtccttg

SEQ ID NO: 22579 - RNA, 22 nt, synthetic construct
  source 1..22: mol_type = other RNA
ggcttgccaaggactcaaaccc

SEQ ID NO: 22580 - RNA, 22 nt, synthetic construct
  source 1..22: mol_type = other RNA
ggcttttgtccccccaagtttt

SEQ ID NO: 22581 - RNA, 22 nt, synthetic construct
  source 1..22: mol_type = other RNA
gggaaaatgacccaacagcctc

SEQ ID NO: 22582 - RNA, 22 nt, synthetic construct
  source 1..22: mol_type = other RNA
gggaaaggcccattgctctcct

SEQ ID NO: 22583 - RNA, 22 nt, synthetic construct
  source 1..22: mol_type = other RNA
gggaacagccacagcagggggg

SEQ ID NO: 22584 - RNA, 22 nt, synthetic construct
  source 1..22: mol_type = other RNA
gggaaccccacatggtacctgt

SEQ ID NO: 22585 - RNA, 22 nt, synthetic construct
  source 1..22: mol_type = other RNA
gggaacgggatgaactcggctc

SEQ ID NO: 22586 - RNA, 22 nt, synthetic construct
  source 1..22: mol_type = other RNA
gggaacggggatgcaggggaac

SEQ ID NO: 22587 - RNA, 22 nt, synthetic construct
  source 1..22: mol_type = other RNA
gggaacggggctcagtctgaag

SEQ ID NO: 22588 - RNA, 22 nt, synthetic construct
  source 1..22: mol_type = other RNA
gggaagaatgagaaacggtggc

SEQ ID NO: 22589 - RNA, 22 nt, synthetic construct
  source 1..22: mol_type = other RNA
gggaagaggttccagcccctcc

SEQ ID NO: 22590 - RNA, 22 nt, synthetic construct
  source 1..22: mol_type = other RNA
gggaagcctgagcgcctctcct

SEQ ID NO: 22591 - RNA, 22 nt, synthetic construct
  source 1..22: mol_type = other RNA
gggaagcgggaccctgctctgg

SEQ ID NO: 22592 - RNA, 22 nt, synthetic construct
  source 1..22: mol_type = other RNA
gggaagggagggggcttctcat

SEQ ID NO: 22593 - RNA, 22 nt, synthetic construct
  source 1..22: mol_type = other RNA
gggaaggggcaggagagccagg

SEQ ID NO: 22594 - RNA, 22 nt, synthetic construct
  source 1..22: mol_type = other RNA
gggaagggggatgcaggggaac

SEQ ID NO: 22595 - RNA, 22 nt, synthetic construct
  source 1..22: mol_type = other RNA
gggaagtgtaaggaagctgcag

SEQ ID NO: 22596 - RNA, 22 nt, synthetic construct
  source 1..22: mol_type = other RNA
gggaatcaagagtcacccagag

SEQ ID NO: 22597 - RNA, 22 nt, synthetic construct
  source 1..22: mol_type = other RNA
gggaatccctcctctctgaacc

SEQ ID NO: 22598 - RNA, 22 nt, synthetic construct
  source 1..22: mol_type = other RNA
gggacaaaagccgaagtccagg

SEQ ID NO: 22599 - RNA, 22 nt, synthetic construct
  source 1..22: mol_type = other RNA
gggacacggtgctaggacagtg

SEQ ID NO: 22600 - RNA, 22 nt, synthetic construct
  source 1..22: mol_type = other RNA
gggacagactcaggggcctggg

SEQ ID NO: 22601 - RNA, 22 nt, synthetic construct
  source 1..22: mol_type = other RNA
gggacagggaagcctgagcgcc

SEQ ID NO: 22602 - RNA, 22 nt, synthetic construct
  source 1..22: mol_type = other RNA
gggacatattcctccgcccaga

SEQ ID NO: 22603 - RNA, 22 nt, synthetic construct
  source 1..22: mol_type = other RNA
gggaccctgctctgggcggagg

SEQ ID NO: 22604 - RNA, 22 nt, synthetic construct
  source 1..22: mol_type = other RNA
gggacctgaactggagctgagg

SEQ ID NO: 22605 - RNA, 22 nt, synthetic construct
  source 1..22: mol_type = other RNA
gggacctgcctggagaaggatg

SEQ ID NO: 22606 - RNA, 22 nt, synthetic construct
  source 1..22: mol_type = other RNA
gggactagaaaggtgaagagcc

SEQ ID NO: 22607 - RNA, 22 nt, synthetic construct
  source 1..22: mol_type = other RNA
gggactccagagggagccacga

SEQ ID NO: 22608 - RNA, 22 nt, synthetic construct
  source 1..22: mol_type = other RNA
gggactccagagtccaggccca

SEQ ID NO: 22609 - RNA, 22 nt, synthetic construct
  source 1..22: mol_type = other RNA
gggactcccagaggggtgagac

SEQ ID NO: 22610 - RNA, 22 nt, synthetic construct
  source 1..22: mol_type = other RNA
gggactctttaaggaaagaagg

SEQ ID NO: 22611 - RNA, 22 nt, synthetic construct
  source 1..22: mol_type = other RNA
gggactgggggcctggactcct

SEQ ID NO: 22612 - RNA, 22 nt, synthetic construct
  source 1..22: mol_type = other RNA
gggacttgccccaggccttgtg

SEQ ID NO: 22613 - RNA, 22 nt, synthetic construct
  source 1..22: mol_type = other RNA
gggacttggggggtaatttatc

SEQ ID NO: 22614 - RNA, 22 nt, synthetic construct
  source 1..22: mol_type = other RNA
gggagaggctgggggcctggac

SEQ ID NO: 22615 - RNA, 22 nt, synthetic construct
  source 1..22: mol_type = other RNA
gggagagggtagcgcagggtgg

SEQ ID NO: 22616 - RNA, 22 nt, synthetic construct
  source 1..22: mol_type = other RNA
gggagccacgaaaacagatcca

SEQ ID NO: 22617 - RNA, 22 nt, synthetic construct
  source 1..22: mol_type = other RNA
gggagctacgagggccaagagc

SEQ ID NO: 22618 - RNA, 22 nt, synthetic construct
  source 1..22: mol_type = other RNA
gggagctgggtttgggtcaggt

SEQ ID NO: 22619 - RNA, 22 nt, synthetic construct
  source 1..22: mol_type = other RNA
gggaggaggggctggggcctgg

SEQ ID NO: 22620 - RNA, 22 nt, synthetic construct
  source 1..22: mol_type = other RNA
gggagggagctacgagggccaa

SEQ ID NO: 22621 - RNA, 22 nt, synthetic construct
  source 1..22: mol_type = other RNA
gggagggggcttctcatctggg

SEQ ID NO: 22622 - RNA, 22 nt, synthetic construct
  source 1..22: mol_type = other RNA
gggaggggggcaaggagagcaa

SEQ ID NO: 22623 - RNA, 22 nt, synthetic construct
  source 1..22: mol_type = other RNA
gggaggggttgggcctggactc

SEQ ID NO: 22624 - RNA, 22 nt, synthetic construct
  source 1..22: mol_type = other RNA
gggagtagaggcggccacgacc

SEQ ID NO: 22625 - RNA, 22 nt, synthetic construct
  source 1..22: mol_type = other RNA
gggagtcccgcccaggcccctg

SEQ ID NO: 22626 - RNA, 22 nt, synthetic construct
  source 1..22: mol_type = other RNA
gggagttttccacacggacacc

SEQ ID NO: 22627 - RNA, 22 nt, synthetic construct
  source 1..22: mol_type = other RNA
gggataaattaccccccaagtc

SEQ ID NO: 22628 - RNA, 22 nt, synthetic construct
  source 1..22: mol_type = other RNA
gggataccccgaagagtgagtt

SEQ ID NO: 22629 - RNA, 22 nt, synthetic construct
  source 1..22: mol_type = other RNA
gggatgaactcggctcgtttat

SEQ ID NO: 22630 - RNA, 22 nt, synthetic construct
  source 1..22: mol_type = other RNA
gggatgcaggggaacggggatg

SEQ ID NO: 22631 - RNA, 22 nt, synthetic construct
  source 1..22: mol_type = other RNA
gggatgcaggggaacggggctc

SEQ ID NO: 22632 - RNA, 22 nt, synthetic construct
  source 1..22: mol_type = other RNA
gggatgcaggggaagggggatg

SEQ ID NO: 22633 - RNA, 22 nt, synthetic construct
  source 1..22: mol_type = other RNA
gggatgcctgtactgggcaggt

SEQ ID NO: 22634 - RNA, 22 nt, synthetic construct
  source 1..22: mol_type = other RNA
gggatgcgtgacctgcccggtt

SEQ ID NO: 22635 - RNA, 22 nt, synthetic construct
  source 1..22: mol_type = other RNA
gggatggttggtcactgtctct

SEQ ID NO: 22636 - RNA, 22 nt, synthetic construct
  source 1..22: mol_type = other RNA
gggattcccttctcaggttacg

SEQ ID NO: 22637 - RNA, 22 nt, synthetic construct
  source 1..22: mol_type = other RNA
gggcaaacagcataagctggtc

SEQ ID NO: 22638 - RNA, 22 nt, synthetic construct
  source 1..22: mol_type = other RNA
gggcaaccaggcgtatcttaaa

SEQ ID NO: 22639 - RNA, 22 nt, synthetic construct
  source 1..22: mol_type = other RNA
gggcaaggagagcaatgggcct

SEQ ID NO: 22640 - RNA, 22 nt, synthetic construct
  source 1..22: mol_type = other RNA
gggcaagtccctcctccgaccc

SEQ ID NO: 22641 - RNA, 22 nt, synthetic construct
  source 1..22: mol_type = other RNA
gggcaccagggactccagagtc

SEQ ID NO: 22642 - RNA, 22 nt, synthetic construct
  source 1..22: mol_type = other RNA
gggcacgtgcggccccttcaca

SEQ ID NO: 22643 - RNA, 22 nt, synthetic construct
  source 1..22: mol_type = other RNA
gggcagctttggagaggtgagg

SEQ ID NO: 22644 - RNA, 22 nt, synthetic construct
  source 1..22: mol_type = other RNA
gggcaggagagccaggggcatg

SEQ ID NO: 22645 - RNA, 22 nt, synthetic construct
  source 1..22: mol_type = other RNA
gggcagggtaccagcctcacca

SEQ ID NO: 22646 - RNA, 22 nt, synthetic construct
  source 1..22: mol_type = other RNA
gggcaggtccttgaaagggaaa

SEQ ID NO: 22647 - RNA, 22 nt, synthetic construct
  source 1..22: mol_type = other RNA
gggcatgagatggtggacgagg

SEQ ID NO: 22648 - RNA, 22 nt, synthetic construct
  source 1..22: mol_type = other RNA
gggccaagagcatgaggtcatg

SEQ ID NO: 22649 - RNA, 22 nt, synthetic construct
  source 1..22: mol_type = other RNA
gggccaccgtttctcattcttc

SEQ ID NO: 22650 - RNA, 22 nt, synthetic construct
  source 1..22: mol_type = other RNA
gggccaggactcctggctctga

SEQ ID NO: 22651 - RNA, 22 nt, synthetic construct
  source 1..22: mol_type = other RNA
gggcccacggcttcgttcctgc

SEQ ID NO: 22652 - RNA, 22 nt, synthetic construct
  source 1..22: mol_type = other RNA
gggcccaggcacacaggtgtgc

SEQ ID NO: 22653 - RNA, 22 nt, synthetic construct
  source 1..22: mol_type = other RNA
gggcccagggctatgcagggtg

SEQ ID NO: 22654 - RNA, 22 nt, synthetic construct
  source 1..22: mol_type = other RNA
gggccccaggctgtcacactcc

SEQ ID NO: 22655 - RNA, 22 nt, synthetic construct
  source 1..22: mol_type = other RNA
gggccccgtgcagagggggcct

SEQ ID NO: 22656 - RNA, 22 nt, synthetic construct
  source 1..22: mol_type = other RNA
gggccctgcagccaggggctga

SEQ ID NO: 22657 - RNA, 22 nt, synthetic construct
  source 1..22: mol_type = other RNA
gggccgcacgtgccctgggaac

SEQ ID NO: 22658 - RNA, 22 nt, synthetic construct
  source 1..22: mol_type = other RNA
gggcctcagtgaactggagtgt

SEQ ID NO: 22659 - RNA, 22 nt, synthetic construct
  source 1..22: mol_type = other RNA
gggcctctgggggatgcagggg

SEQ ID NO: 22660 - RNA, 22 nt, synthetic construct
  source 1..22: mol_type = other RNA
gggcctggacccctgggtctga

SEQ ID NO: 22661 - RNA, 22 nt, synthetic construct
  source 1..22: mol_type = other RNA
gggcctggactccttcatctga

SEQ ID NO: 22662 - RNA, 22 nt, synthetic construct
  source 1..22: mol_type = other RNA
gggcctggactctggagtccct

SEQ ID NO: 22663 - RNA, 22 nt, synthetic construct
  source 1..22: mol_type = other RNA
gggcctggacttctgggtctta

SEQ ID NO: 22664 - RNA, 22 nt, synthetic construct
  source 1..22: mol_type = other RNA
gggcctggcctcctgggttgaa

SEQ ID NO: 22665 - RNA, 22 nt, synthetic construct
  source 1..22: mol_type = other RNA
gggcctgggcgggactcccaga

SEQ ID NO: 22666 - RNA, 22 nt, synthetic construct
  source 1..22: mol_type = other RNA
gggcctgggctcctgggtttga

SEQ ID NO: 22667 - RNA, 22 nt, synthetic construct
  source 1..22: mol_type = other RNA
gggccttagggaagcgggaccc

SEQ ID NO: 22668 - RNA, 22 nt, synthetic construct
  source 1..22: mol_type = other RNA
gggcctttccctttcaaggacc

SEQ ID NO: 22669 - RNA, 22 nt, synthetic construct
  source 1..22: mol_type = other RNA
gggcgatgcttggggacctgcc

SEQ ID NO: 22670 - RNA, 22 nt, synthetic construct
  source 1..22: mol_type = other RNA
gggcggaagggctggggcctgg

SEQ ID NO: 22671 - RNA, 22 nt, synthetic construct
  source 1..22: mol_type = other RNA
gggcggaggaatatgtcccaga

SEQ ID NO: 22672 - RNA, 22 nt, synthetic construct
  source 1..22: mol_type = other RNA
gggcgggactcccagaggggtg

SEQ ID NO: 22673 - RNA, 22 nt, synthetic construct
  source 1..22: mol_type = other RNA
gggctagagtaggaggggctgg

SEQ ID NO: 22674 - RNA, 22 nt, synthetic construct
  source 1..22: mol_type = other RNA
gggctatgcagggtggaggaag

SEQ ID NO: 22675 - RNA, 22 nt, synthetic construct
  source 1..22: mol_type = other RNA
gggctcagtctgaagagcagag

SEQ ID NO: 22676 - RNA, 22 nt, synthetic construct
  source 1..22: mol_type = other RNA
gggctccgggacctgaactgga

SEQ ID NO: 22677 - RNA, 22 nt, synthetic construct
  source 1..22: mol_type = other RNA
gggctcctgggtttgagagagg

SEQ ID NO: 22678 - RNA, 22 nt, synthetic construct
  source 1..22: mol_type = other RNA
gggctgaacagagaagagctgg

SEQ ID NO: 22679 - RNA, 22 nt, synthetic construct
  source 1..22: mol_type = other RNA
gggctgacacgggccaccgttt

SEQ ID NO: 22680 - RNA, 22 nt, synthetic construct
  source 1..22: mol_type = other RNA
gggctggaacctcttccctagt

SEQ ID NO: 22681 - RNA, 22 nt, synthetic construct
  source 1..22: mol_type = other RNA
gggctggagccaggattcttag

SEQ ID NO: 22682 - RNA, 22 nt, synthetic construct
  source 1..22: mol_type = other RNA
gggctggctactggccttatct

SEQ ID NO: 22683 - RNA, 22 nt, synthetic construct
  source 1..22: mol_type = other RNA
gggctgggcctggacccctggg

SEQ ID NO: 22684 - RNA, 22 nt, synthetic construct
  source 1..22: mol_type = other RNA
gggctggggcctggactcctgg

SEQ ID NO: 22685 - RNA, 22 nt, synthetic construct
  source 1..22: mol_type = other RNA
gggctggggcctggactcgtgg

SEQ ID NO: 22686 - RNA, 22 nt, synthetic construct
  source 1..22: mol_type = other RNA
gggctggggcctggcctcctgg

SEQ ID NO: 22687 - RNA, 22 nt, synthetic construct
  source 1..22: mol_type = other RNA
gggctgggggccaggactcctg

SEQ ID NO: 22688 - RNA, 22 nt, synthetic construct
  source 1..22: mol_type = other RNA
gggctgggggcctggacttctg

SEQ ID NO: 22689 - RNA, 22 nt, synthetic construct
  source 1..22: mol_type = other RNA
gggctggggtggcctctcgtgg

SEQ ID NO: 22690 - RNA, 22 nt, synthetic construct
  source 1..22: mol_type = other RNA
gggctggggttcagagaggagg

SEQ ID NO: 22691 - RNA, 22 nt, synthetic construct
  source 1..22: mol_type = other RNA
gggctgtgaaggggccgcacgt

SEQ ID NO: 22692 - RNA, 22 nt, synthetic construct
  source 1..22: mol_type = other RNA
gggctgtggtgaggaggggggt

SEQ ID NO: 22693 - RNA, 22 nt, synthetic construct
  source 1..22: mol_type = other RNA
gggctgtgtttctcgtcctgca

SEQ ID NO: 22694 - RNA, 22 nt, synthetic construct
  source 1..22: mol_type = other RNA
gggcttctcatctgggtgcggg

SEQ ID NO: 22695 - RNA, 22 nt, synthetic construct
  source 1..22: mol_type = other RNA
gggcttctgggtttgagtcctt

SEQ ID NO: 22696 - RNA, 22 nt, synthetic construct
  source 1..22: mol_type = other RNA
gggcttgccaaggactcaaacc

SEQ ID NO: 22697 - RNA, 22 nt, synthetic construct
  source 1..22: mol_type = other RNA
ggggaaaatgacccaacagcct

SEQ ID NO: 22698 - RNA, 22 nt, synthetic construct
  source 1..22: mol_type = other RNA
ggggaacggggatgcaggggaa

SEQ ID NO: 22699 - RNA, 22 nt, synthetic construct
  source 1..22: mol_type = other RNA
ggggaacggggctcagtctgaa

SEQ ID NO: 22700 - RNA, 22 nt, synthetic construct
  source 1..22: mol_type = other RNA
ggggaagggagggggcttctca

SEQ ID NO: 22701 - RNA, 22 nt, synthetic construct
  source 1..22: mol_type = other RNA
ggggaagggggatgcaggggaa

SEQ ID NO: 22702 - RNA, 22 nt, synthetic construct
  source 1..22: mol_type = other RNA
ggggacaaaagccgaagtccag

SEQ ID NO: 22703 - RNA, 22 nt, synthetic construct
  source 1..22: mol_type = other RNA
ggggacagggaagcctgagcgc

SEQ ID NO: 22704 - RNA, 22 nt, synthetic construct
  source 1..22: mol_type = other RNA
ggggacctgcctggagaaggat

SEQ ID NO: 22705 - RNA, 22 nt, synthetic construct
  source 1..22: mol_type = other RNA
ggggactagaaaggtgaagagc

SEQ ID NO: 22706 - RNA, 22 nt, synthetic construct
  source 1..22: mol_type = other RNA
ggggactctttaaggaaagaag

SEQ ID NO: 22707 - RNA, 22 nt, synthetic construct
  source 1..22: mol_type = other RNA
ggggagaggctgggggcctgga

SEQ ID NO: 22708 - RNA, 22 nt, synthetic construct
  source 1..22: mol_type = other RNA
ggggagctgggtttgggtcagg

SEQ ID NO: 22709 - RNA, 22 nt, synthetic construct
  source 1..22: mol_type = other RNA
ggggaggggggcaaggagagca

SEQ ID NO: 22710 - RNA, 22 nt, synthetic construct
  source 1..22: mol_type = other RNA
ggggaggggttgggcctggact

SEQ ID NO: 22711 - RNA, 22 nt, synthetic construct
  source 1..22: mol_type = other RNA
ggggatgcaggggaacggggat

SEQ ID NO: 22712 - RNA, 22 nt, synthetic construct
  source 1..22: mol_type = other RNA
ggggatgcaggggaacggggct

SEQ ID NO: 22713 - RNA, 22 nt, synthetic construct
  source 1..22: mol_type = other RNA
ggggatgcaggggaagggggat

SEQ ID NO: 22714 - RNA, 22 nt, synthetic construct
  source 1..22: mol_type = other RNA
ggggatgcgtgacctgcccggt

SEQ ID NO: 22715 - RNA, 22 nt, synthetic construct
  source 1..22: mol_type = other RNA
ggggcaaggagagcaatgggcc

SEQ ID NO: 22716 - RNA, 22 nt, synthetic construct
  source 1..22: mol_type = other RNA
ggggcaagtccctcctccgacc

SEQ ID NO: 22717 - RNA, 22 nt, synthetic construct
  source 1..22: mol_type = other RNA
ggggcaggagagccaggggcat

SEQ ID NO: 22718 - RNA, 22 nt, synthetic construct
  source 1..22: mol_type = other RNA
ggggcagggtaccagcctcacc

SEQ ID NO: 22719 - RNA, 22 nt, synthetic construct
  source 1..22: mol_type = other RNA
ggggcatgagatggtggacgag

SEQ ID NO: 22720 - RNA, 22 nt, synthetic construct
  source 1..22: mol_type = other RNA
ggggccaggactcctggctctg

SEQ ID NO: 22721 - RNA, 22 nt, synthetic construct
  source 1..22: mol_type = other RNA
ggggcccaggcacacaggtgtg

SEQ ID NO: 22722 - RNA, 22 nt, synthetic construct
  source 1..22: mol_type = other RNA
ggggccctgcagccaggggctg

SEQ ID NO: 22723 - RNA, 22 nt, synthetic construct
  source 1..22: mol_type = other RNA
ggggccgcacgtgccctgggaa

SEQ ID NO: 22724 - RNA, 22 nt, synthetic construct
  source 1..22: mol_type = other RNA
ggggcctcagtgaactggagtg

SEQ ID NO: 22725 - RNA, 22 nt, synthetic construct
  source 1..22: mol_type = other RNA
ggggcctctgggggatgcaggg

SEQ ID NO: 22726 - RNA, 22 nt, synthetic construct
  source 1..22: mol_type = other RNA
ggggcctggactccttcatctg

SEQ ID NO: 22727 - RNA, 22 nt, synthetic construct
  source 1..22: mol_type = other RNA
ggggcctggacttctgggtctt

SEQ ID NO: 22728 - RNA, 22 nt, synthetic construct
  source 1..22: mol_type = other RNA
ggggcctggcctcctgggttga

SEQ ID NO: 22729 - RNA, 22 nt, synthetic construct
  source 1..22: mol_type = other RNA
ggggcctgggcgggactcccag

SEQ ID NO: 22730 - RNA, 22 nt, synthetic construct
  source 1..22: mol_type = other RNA
ggggcctgggctcctgggtttg

SEQ ID NO: 22731 - RNA, 22 nt, synthetic construct
  source 1..22: mol_type = other RNA
ggggcgatgcttggggacctgc

SEQ ID NO: 22732 - RNA, 22 nt, synthetic construct
  source 1..22: mol_type = other RNA
ggggctagagtaggaggggctg

SEQ ID NO: 22733 - RNA, 22 nt, synthetic construct
  source 1..22: mol_type = other RNA
ggggctcagtctgaagagcaga

SEQ ID NO: 22734 - RNA, 22 nt, synthetic construct
  source 1..22: mol_type = other RNA
ggggctgacacgggccaccgtt

SEQ ID NO: 22735 - RNA, 22 nt, synthetic construct
  source 1..22: mol_type = other RNA
ggggctggaacctcttccctag

SEQ ID NO: 22736 - RNA, 22 nt, synthetic construct
  source 1..22: mol_type = other RNA
ggggctggagccaggattctta

SEQ ID NO: 22737 - RNA, 22 nt, synthetic construct
  source 1..22: mol_type = other RNA
ggggctggctactggccttatc

SEQ ID NO: 22738 - RNA, 22 nt, synthetic construct
  source 1..22: mol_type = other RNA
ggggctgggcctggacccctgg

SEQ ID NO: 22739 - RNA, 22 nt, synthetic construct
  source 1..22: mol_type = other RNA
ggggctggggcctggactcctg

SEQ ID NO: 22740 - RNA, 22 nt, synthetic construct
  source 1..22: mol_type = other RNA
ggggctggggcctggactcgtg

SEQ ID NO: 22741 - RNA, 22 nt, synthetic construct
  source 1..22: mol_type = other RNA
ggggctgggggccaggactcct

SEQ ID NO: 22742 - RNA, 22 nt, synthetic construct
  source 1..22: mol_type = other RNA
ggggctgggggcctggacttct

SEQ ID NO: 22743 - RNA, 22 nt, synthetic construct
  source 1..22: mol_type = other RNA
ggggctgtgtttctcgtcctgc

SEQ ID NO: 22744 - RNA, 22 nt, synthetic construct
  source 1..22: mol_type = other RNA
ggggcttctcatctgggtgcgg

SEQ ID NO: 22745 - RNA, 22 nt, synthetic construct
  source 1..22: mol_type = other RNA
gggggacaaaagccgaagtcca

SEQ ID NO: 22746 - RNA, 22 nt, synthetic construct
  source 1..22: mol_type = other RNA
gggggacagggaagcctgagcg

SEQ ID NO: 22747 - RNA, 22 nt, synthetic construct
  source 1..22: mol_type = other RNA
gggggatgcaggggaacgggga

SEQ ID NO: 22748 - RNA, 22 nt, synthetic construct
  source 1..22: mol_type = other RNA
gggggatgcaggggaaggggga

SEQ ID NO: 22749 - RNA, 22 nt, synthetic construct
  source 1..22: mol_type = other RNA
gggggatgcgtgacctgcccgg

SEQ ID NO: 22750 - RNA, 22 nt, synthetic construct
  source 1..22: mol_type = other RNA
gggggcaaggagagcaatgggc

SEQ ID NO: 22751 - RNA, 22 nt, synthetic construct
  source 1..22: mol_type = other RNA
gggggcagggtaccagcctcac

SEQ ID NO: 22752 - RNA, 22 nt, synthetic construct
  source 1..22: mol_type = other RNA
gggggccaggactcctggctct

SEQ ID NO: 22753 - RNA, 22 nt, synthetic construct
  source 1..22: mol_type = other RNA
gggggcctcagtgaactggagt

SEQ ID NO: 22754 - RNA, 22 nt, synthetic construct
  source 1..22: mol_type = other RNA
gggggcctggactccttcatct

SEQ ID NO: 22755 - RNA, 22 nt, synthetic construct
  source 1..22: mol_type = other RNA
gggggcctggacttctgggtct

SEQ ID NO: 22756 - RNA, 22 nt, synthetic construct
  source 1..22: mol_type = other RNA
gggggcctgggctcctgggttt

SEQ ID NO: 22757 - RNA, 22 nt, synthetic construct
  source 1..22: mol_type = other RNA
gggggcgatgcttggggacctg

SEQ ID NO: 22758 - RNA, 22 nt, synthetic construct
  source 1..22: mol_type = other RNA
gggggctagagtaggaggggct

SEQ ID NO: 22759 - RNA, 22 nt, synthetic construct
  source 1..22: mol_type = other RNA
gggggcttctcatctgggtgcg

SEQ ID NO: 22760 - RNA, 22 nt, synthetic construct
  source 1..22: mol_type = other RNA
ggggggacaaaagccgaagtcc

SEQ ID NO: 22761 - RNA, 22 nt, synthetic construct
  source 1..22: mol_type = other RNA
ggggggatgcgtgacctgcccg

SEQ ID NO: 22762 - RNA, 22 nt, synthetic construct
  source 1..22: mol_type = other RNA
ggggggcaaggagagcaatggg

SEQ ID NO: 22763 - RNA, 22 nt, synthetic construct
  source 1..22: mol_type = other RNA
ggggggcgatgcttggggacct

SEQ ID NO: 22764 - RNA, 22 nt, synthetic construct
  source 1..22: mol_type = other RNA
ggggggtaatttatcccgtgga

SEQ ID NO: 22765 - RNA, 22 nt, synthetic construct
  source 1..22: mol_type = other RNA
ggggggtgtccgtgtggaaaac

SEQ ID NO: 22766 - RNA, 22 nt, synthetic construct
  source 1..22: mol_type = other RNA
gggggtaatttatcccgtggat

SEQ ID NO: 22767 - RNA, 22 nt, synthetic construct
  source 1..22: mol_type = other RNA
gggggtcggaggagggacttgc

SEQ ID NO: 22768 - RNA, 22 nt, synthetic construct
  source 1..22: mol_type = other RNA
gggggtgtccgtgtggaaaact

SEQ ID NO: 22769 - RNA, 22 nt, synthetic construct
  source 1..22: mol_type = other RNA
gggggttgggggctagagtagg

SEQ ID NO: 22770 - RNA, 22 nt, synthetic construct
  source 1..22: mol_type = other RNA
gggggttttgccgtgtctaaca

SEQ ID NO: 22771 - RNA, 22 nt, synthetic construct
  source 1..22: mol_type = other RNA
ggggtaatttatcccgtggatc

SEQ ID NO: 22772 - RNA, 22 nt, synthetic construct
  source 1..22: mol_type = other RNA
ggggtaccctaagaacttggga

SEQ ID NO: 22773 - RNA, 22 nt, synthetic construct
  source 1..22: mol_type = other RNA
ggggtatcccaggaggcctgga

SEQ ID NO: 22774 - RNA, 22 nt, synthetic construct
  source 1..22: mol_type = other RNA
ggggtccaaaacttggggggac

SEQ ID NO: 22775 - RNA, 22 nt, synthetic construct
  source 1..22: mol_type = other RNA
ggggtccaggccaagtaggtgg

SEQ ID NO: 22776 - RNA, 22 nt, synthetic construct
  source 1..22: mol_type = other RNA
ggggtccaggcccagccccgcc

SEQ ID NO: 22777 - RNA, 22 nt, synthetic construct
  source 1..22: mol_type = other RNA
ggggtcggaggagggacttgcc

SEQ ID NO: 22778 - RNA, 22 nt, synthetic construct
  source 1..22: mol_type = other RNA
ggggtgaccagcttatgctgtt

SEQ ID NO: 22779 - RNA, 22 nt, synthetic construct
  source 1..22: mol_type = other RNA
ggggtgactgcttggcaaactc

SEQ ID NO: 22780 - RNA, 22 nt, synthetic construct
  source 1..22: mol_type = other RNA
ggggtgagacagctgcacacct

SEQ ID NO: 22781 - RNA, 22 nt, synthetic construct
  source 1..22: mol_type = other RNA
ggggtgcaggaatgggggcagg

SEQ ID NO: 22782 - RNA, 22 nt, synthetic construct
  source 1..22: mol_type = other RNA
ggggtggcctctcgtggggtcc

SEQ ID NO: 22783 - RNA, 22 nt, synthetic construct
  source 1..22: mol_type = other RNA
ggggtgggctggggttcagaga

SEQ ID NO: 22784 - RNA, 22 nt, synthetic construct
  source 1..22: mol_type = other RNA
ggggtggtttccgagcttgacc

SEQ ID NO: 22785 - RNA, 22 nt, synthetic construct
  source 1..22: mol_type = other RNA
ggggtgtccgtgtggaaaactc

SEQ ID NO: 22786 - RNA, 22 nt, synthetic construct
  source 1..22: mol_type = other RNA
ggggttcagagaggagggattc

SEQ ID NO: 22787 - RNA, 22 nt, synthetic construct
  source 1..22: mol_type = other RNA
ggggttcccgcacccagatgag

SEQ ID NO: 22788 - RNA, 22 nt, synthetic construct
  source 1..22: mol_type = other RNA
ggggttcctggctctgctcttc

SEQ ID NO: 22789 - RNA, 22 nt, synthetic construct
  source 1..22: mol_type = other RNA
ggggttgggcctggactctgga

SEQ ID NO: 22790 - RNA, 22 nt, synthetic construct
  source 1..22: mol_type = other RNA
ggggttgggggctagagtagga

SEQ ID NO: 22791 - RNA, 22 nt, synthetic construct
  source 1..22: mol_type = other RNA
ggggttttgccgtgtctaacag

SEQ ID NO: 22792 - RNA, 22 nt, synthetic construct
  source 1..22: mol_type = other RNA
gggtaatttatcccgtggatct

SEQ ID NO: 22793 - RNA, 22 nt, synthetic construct
  source 1..22: mol_type = other RNA
gggtaccagcctcaccaagtgg

SEQ ID NO: 22794 - RNA, 22 nt, synthetic construct
  source 1..22: mol_type = other RNA
gggtaccccacgtgggtttatc

SEQ ID NO: 22795 - RNA, 22 nt, synthetic construct
  source 1..22: mol_type = other RNA
gggtaccctaagaacttgggaa

SEQ ID NO: 22796 - RNA, 22 nt, synthetic construct
  source 1..22: mol_type = other RNA
gggtagcgcagggtggccactg

SEQ ID NO: 22797 - RNA, 22 nt, synthetic construct
  source 1..22: mol_type = other RNA
gggtatcccaggaggcctggag

SEQ ID NO: 22798 - RNA, 22 nt, synthetic construct
  source 1..22: mol_type = other RNA
gggtcaagctcggaaaccaccc

SEQ ID NO: 22799 - RNA, 22 nt, synthetic construct
  source 1..22: mol_type = other RNA
gggtcaggtctgggtgtggggt

SEQ ID NO: 22800 - RNA, 22 nt, synthetic construct
  source 1..22: mol_type = other RNA
gggtcattttccccactgtcct

SEQ ID NO: 22801 - RNA, 22 nt, synthetic construct
  source 1..22: mol_type = other RNA
gggtccaaaacttggggggaca

SEQ ID NO: 22802 - RNA, 22 nt, synthetic construct
  source 1..22: mol_type = other RNA
gggtccaggccaagtaggtggc

SEQ ID NO: 22803 - RNA, 22 nt, synthetic construct
  source 1..22: mol_type = other RNA
gggtccaggcccagccccgcct

SEQ ID NO: 22804 - RNA, 22 nt, synthetic construct
  source 1..22: mol_type = other RNA
gggtcccgcttccctaaggccc

SEQ ID NO: 22805 - RNA, 22 nt, synthetic construct
  source 1..22: mol_type = other RNA
gggtcggaggagggacttgccc

SEQ ID NO: 22806 - RNA, 22 nt, synthetic construct
  source 1..22: mol_type = other RNA
gggtctgaatggggagaggctg

SEQ ID NO: 22807 - RNA, 22 nt, synthetic construct
  source 1..22: mol_type = other RNA
gggtctgagggtggagggactg

SEQ ID NO: 22808 - RNA, 22 nt, synthetic construct
  source 1..22: mol_type = other RNA
gggtcttagggaggcggggctg

SEQ ID NO: 22809 - RNA, 22 nt, synthetic construct
  source 1..22: mol_type = other RNA
gggtgaccagcttatgctgttt

SEQ ID NO: 22810 - RNA, 22 nt, synthetic construct
  source 1..22: mol_type = other RNA
gggtgactcttgattcccggcc

SEQ ID NO: 22811 - RNA, 22 nt, synthetic construct
  source 1..22: mol_type = other RNA
gggtgactgcttggcaaactca

SEQ ID NO: 22812 - RNA, 22 nt, synthetic construct
  source 1..22: mol_type = other RNA
gggtgagacagctgcacacctg

SEQ ID NO: 22813 - RNA, 22 nt, synthetic construct
  source 1..22: mol_type = other RNA
gggtgcaggaatgggggcaggg

SEQ ID NO: 22814 - RNA, 22 nt, synthetic construct
  source 1..22: mol_type = other RNA
gggtgcgggaaccccacatggt

SEQ ID NO: 22815 - RNA, 22 nt, synthetic construct
  source 1..22: mol_type = other RNA
gggtggaaataaacgagccgag

SEQ ID NO: 22816 - RNA, 22 nt, synthetic construct
  source 1..22: mol_type = other RNA
gggtggaggaaggccaccctgt

SEQ ID NO: 22817 - RNA, 22 nt, synthetic construct
  source 1..22: mol_type = other RNA
gggtggagggactgggggcctg

SEQ ID NO: 22818 - RNA, 22 nt, synthetic construct
  source 1..22: mol_type = other RNA
gggtggattctcctccaactgt

SEQ ID NO: 22819 - RNA, 22 nt, synthetic construct
  source 1..22: mol_type = other RNA
gggtggccactgagaaccgggc

SEQ ID NO: 22820 - RNA, 22 nt, synthetic construct
  source 1..22: mol_type = other RNA
gggtggcctctcgtggggtcca

SEQ ID NO: 22821 - RNA, 22 nt, synthetic construct
  source 1..22: mol_type = other RNA
gggtggccttcctccaccctgc

SEQ ID NO: 22822 - RNA, 22 nt, synthetic construct
  source 1..22: mol_type = other RNA
gggtgggctccgggacctgaac

SEQ ID NO: 22823 - RNA, 22 nt, synthetic construct
  source 1..22: mol_type = other RNA
gggtgggctggggttcagagag

SEQ ID NO: 22824 - RNA, 22 nt, synthetic construct
  source 1..22: mol_type = other RNA
gggtggtgacgggggttttgcc

SEQ ID NO: 22825 - RNA, 22 nt, synthetic construct
  source 1..22: mol_type = other RNA
gggtggtttccgagcttgaccc

SEQ ID NO: 22826 - RNA, 22 nt, synthetic construct
  source 1..22: mol_type = other RNA
gggtgtccgtgtggaaaactcc

SEQ ID NO: 22827 - RNA, 22 nt, synthetic construct
  source 1..22: mol_type = other RNA
gggtgtggggtgaccagcttat

SEQ ID NO: 22828 - RNA, 22 nt, synthetic construct
  source 1..22: mol_type = other RNA
gggttcagagaggagggattcc

SEQ ID NO: 22829 - RNA, 22 nt, synthetic construct
  source 1..22: mol_type = other RNA
gggttcccgcacccagatgaga

SEQ ID NO: 22830 - RNA, 22 nt, synthetic construct
  source 1..22: mol_type = other RNA
gggttcctggctctgctcttca

SEQ ID NO: 22831 - RNA, 22 nt, synthetic construct
  source 1..22: mol_type = other RNA
gggttgaatggggaggggttgg

SEQ ID NO: 22832 - RNA, 22 nt, synthetic construct
  source 1..22: mol_type = other RNA
gggttgggcctggactctggag

SEQ ID NO: 22833 - RNA, 22 nt, synthetic construct
  source 1..22: mol_type = other RNA
gggttgggggctagagtaggag

SEQ ID NO: 22834 - RNA, 22 nt, synthetic construct
  source 1..22: mol_type = other RNA
gggtttaaggcaggaggggctg

SEQ ID NO: 22835 - RNA, 22 nt, synthetic construct
  source 1..22: mol_type = other RNA
gggtttatcaaccacttggtga

SEQ ID NO: 22836 - RNA, 22 nt, synthetic construct
  source 1..22: mol_type = other RNA
gggtttcagtgctaaaactagg

SEQ ID NO: 22837 - RNA, 22 nt, synthetic construct
  source 1..22: mol_type = other RNA
gggtttgagagaggaggggctg

SEQ ID NO: 22838 - RNA, 22 nt, synthetic construct
  source 1..22: mol_type = other RNA
gggtttgagtccttggcaagcc

SEQ ID NO: 22839 - RNA, 22 nt, synthetic construct
  source 1..22: mol_type = other RNA
gggtttgggtcaggtctgggtg

SEQ ID NO: 22840 - RNA, 22 nt, synthetic construct
  source 1..22: mol_type = other RNA
gggttttgccgtgtctaacagg

SEQ ID NO: 22841 - RNA, 22 nt, synthetic construct
  source 1..22: mol_type = other RNA
ggtaaaactgacgcacggagga

SEQ ID NO: 22842 - RNA, 22 nt, synthetic construct
  source 1..22: mol_type = other RNA
ggtaatttatcccgtggatcta

SEQ ID NO: 22843 - RNA, 22 nt, synthetic construct
  source 1..22: mol_type = other RNA
ggtaccagcctcaccaagtggt

SEQ ID NO: 22844 - RNA, 22 nt, synthetic construct
  source 1..22: mol_type = other RNA
ggtaccatgtggggttcccgca

SEQ ID NO: 22845 - RNA, 22 nt, synthetic construct
  source 1..22: mol_type = other RNA
ggtaccccacgtgggtttatca

SEQ ID NO: 22846 - RNA, 22 nt, synthetic construct
  source 1..22: mol_type = other RNA
ggtaccctaagaacttgggaac

SEQ ID NO: 22847 - RNA, 22 nt, synthetic construct
  source 1..22: mol_type = other RNA
ggtaccctgcccccattcctgc

SEQ ID NO: 22848 - RNA, 22 nt, synthetic construct
  source 1..22: mol_type = other RNA
ggtacctgttagacacggcaaa

SEQ ID NO: 22849 - RNA, 22 nt, synthetic construct
  source 1..22: mol_type = other RNA
ggtagacagggctggggtggcc

SEQ ID NO: 22850 - RNA, 22 nt, synthetic construct
  source 1..22: mol_type = other RNA
ggtagcgcagggtggccactga

SEQ ID NO: 22851 - RNA, 22 nt, synthetic construct
  source 1..22: mol_type = other RNA
ggtatcccaggaggcctggagc

SEQ ID NO: 22852 - RNA, 22 nt, synthetic construct
  source 1..22: mol_type = other RNA
ggtcaagctcggaaaccacccc

SEQ ID NO: 22853 - RNA, 22 nt, synthetic construct
  source 1..22: mol_type = other RNA
ggtcaccccacacccagacctg

SEQ ID NO: 22854 - RNA, 22 nt, synthetic construct
  source 1..22: mol_type = other RNA
ggtcactgtctctgggtgactc

SEQ ID NO: 22855 - RNA, 22 nt, synthetic construct
  source 1..22: mol_type = other RNA
ggtcaggccggccaggccttca

SEQ ID NO: 22856 - RNA, 22 nt, synthetic construct
  source 1..22: mol_type = other RNA
ggtcaggtctgggtgtggggtg

SEQ ID NO: 22857 - RNA, 22 nt, synthetic construct
  source 1..22: mol_type = other RNA
ggtcatggaaactcgggctgtg

SEQ ID NO: 22858 - RNA, 22 nt, synthetic construct
  source 1..22: mol_type = other RNA
ggtcattttccccactgtccta

SEQ ID NO: 22859 - RNA, 22 nt, synthetic construct
  source 1..22: mol_type = other RNA
ggtccaaaacttggggggacaa

SEQ ID NO: 22860 - RNA, 22 nt, synthetic construct
  source 1..22: mol_type = other RNA
ggtccaggccaagtaggtggcc

SEQ ID NO: 22861 - RNA, 22 nt, synthetic construct
  source 1..22: mol_type = other RNA
ggtccaggcccagccccgcctc

SEQ ID NO: 22862 - RNA, 22 nt, synthetic construct
  source 1..22: mol_type = other RNA
ggtccccaagcatcgcccccct

SEQ ID NO: 22863 - RNA, 22 nt, synthetic construct
  source 1..22: mol_type = other RNA
ggtcccgcttccctaaggccct

SEQ ID NO: 22864 - RNA, 22 nt, synthetic construct
  source 1..22: mol_type = other RNA
ggtcccggagcccacccagtgt

SEQ ID NO: 22865 - RNA, 22 nt, synthetic construct
  source 1..22: mol_type = other RNA
ggtcctgagttctaactttggc

SEQ ID NO: 22866 - RNA, 22 nt, synthetic construct
  source 1..22: mol_type = other RNA
ggtccttccaagggtcaagctc

SEQ ID NO: 22867 - RNA, 22 nt, synthetic construct
  source 1..22: mol_type = other RNA
ggtccttgaaagggaaaggccc

SEQ ID NO: 22868 - RNA, 22 nt, synthetic construct
  source 1..22: mol_type = other RNA
ggtcggaggagggacttgcccc

SEQ ID NO: 22869 - RNA, 22 nt, synthetic construct
  source 1..22: mol_type = other RNA
ggtcgtggccgcctctactccc

SEQ ID NO: 22870 - RNA, 22 nt, synthetic construct
  source 1..22: mol_type = other RNA
ggtctgaatggggagaggctgg

SEQ ID NO: 22871 - RNA, 22 nt, synthetic construct
  source 1..22: mol_type = other RNA
ggtctgagggtggagggactgg

SEQ ID NO: 22872 - RNA, 22 nt, synthetic construct
  source 1..22: mol_type = other RNA
ggtctgggtgtggggtgaccag

SEQ ID NO: 22873 - RNA, 22 nt, synthetic construct
  source 1..22: mol_type = other RNA
ggtcttagggaggcggggctgg

SEQ ID NO: 22874 - RNA, 22 nt, synthetic construct
  source 1..22: mol_type = other RNA
ggtgaacacctaggacgcacca

SEQ ID NO: 22875 - RNA, 22 nt, synthetic construct
  source 1..22: mol_type = other RNA
ggtgaagagccaaagttagaac

SEQ ID NO: 22876 - RNA, 22 nt, synthetic construct
  source 1..22: mol_type = other RNA
ggtgaccagcttatgctgtttg

SEQ ID NO: 22877 - RNA, 22 nt, synthetic construct
  source 1..22: mol_type = other RNA
ggtgacgggggttttgccgtgt

SEQ ID NO: 22878 - RNA, 22 nt, synthetic construct
  source 1..22: mol_type = other RNA
ggtgactcttgattcccggcca

SEQ ID NO: 22879 - RNA, 22 nt, synthetic construct
  source 1..22: mol_type = other RNA
ggtgactgcttggcaaactcac

SEQ ID NO: 22880 - RNA, 22 nt, synthetic construct
  source 1..22: mol_type = other RNA
ggtgagacagctgcacacctgt

SEQ ID NO: 22881 - RNA, 22 nt, synthetic construct
  source 1..22: mol_type = other RNA
ggtgaggaggggggtgtccgtg

SEQ ID NO: 22882 - RNA, 22 nt, synthetic construct
  source 1..22: mol_type = other RNA
ggtgaggctggtaccctgcccc

SEQ ID NO: 22883 - RNA, 22 nt, synthetic construct
  source 1..22: mol_type = other RNA
ggtgagggacttggggggtaat

SEQ ID NO: 22884 - RNA, 22 nt, synthetic construct
  source 1..22: mol_type = other RNA
ggtgcaggaatgggggcagggt

SEQ ID NO: 22885 - RNA, 22 nt, synthetic construct
  source 1..22: mol_type = other RNA
ggtgcccaggcctcaggcatct

SEQ ID NO: 22886 - RNA, 22 nt, synthetic construct
  source 1..22: mol_type = other RNA
ggtgcgggaaccccacatggta

SEQ ID NO: 22887 - RNA, 22 nt, synthetic construct
  source 1..22: mol_type = other RNA
ggtgcgtcctaggtgttcacca

SEQ ID NO: 22888 - RNA, 22 nt, synthetic construct
  source 1..22: mol_type = other RNA
ggtgcgtttcactgatcctggt

SEQ ID NO: 22889 - RNA, 22 nt, synthetic construct
  source 1..22: mol_type = other RNA
ggtgctaggacagtggggaaaa

SEQ ID NO: 22890 - RNA, 22 nt, synthetic construct
  source 1..22: mol_type = other RNA
ggtgctgcagcttccttacact

SEQ ID NO: 22891 - RNA, 22 nt, synthetic construct
  source 1..22: mol_type = other RNA
ggtggaaataaacgagccgagt

SEQ ID NO: 22892 - RNA, 22 nt, synthetic construct
  source 1..22: mol_type = other RNA
ggtggacgaggaagggggacag

SEQ ID NO: 22893 - RNA, 22 nt, synthetic construct
  source 1..22: mol_type = other RNA
ggtggagaaactggccgggaat

SEQ ID NO: 22894 - RNA, 22 nt, synthetic construct
  source 1..22: mol_type = other RNA
ggtggaggaaggccaccctgtg

SEQ ID NO: 22895 - RNA, 22 nt, synthetic construct
  source 1..22: mol_type = other RNA
ggtggagggactgggggcctgg

SEQ ID NO: 22896 - RNA, 22 nt, synthetic construct
  source 1..22: mol_type = other RNA
ggtggattctcctccaactgtg

SEQ ID NO: 22897 - RNA, 22 nt, synthetic construct
  source 1..22: mol_type = other RNA
ggtggccactgagaaccgggca

SEQ ID NO: 22898 - RNA, 22 nt, synthetic construct
  source 1..22: mol_type = other RNA
ggtggcccgtgtcagcccctgg

SEQ ID NO: 22899 - RNA, 22 nt, synthetic construct
  source 1..22: mol_type = other RNA
ggtggcctctcgtggggtccag

SEQ ID NO: 22900 - RNA, 22 nt, synthetic construct
  source 1..22: mol_type = other RNA
ggtggcctggggcctctggggg

SEQ ID NO: 22901 - RNA, 22 nt, synthetic construct
  source 1..22: mol_type = other RNA
ggtggccttcctccaccctgca

SEQ ID NO: 22902 - RNA, 22 nt, synthetic construct
  source 1..22: mol_type = other RNA
ggtggcgcttccagtgctcaga

SEQ ID NO: 22903 - RNA, 22 nt, synthetic construct
  source 1..22: mol_type = other RNA
ggtgggctccgggacctgaact

SEQ ID NO: 22904 - RNA, 22 nt, synthetic construct
  source 1..22: mol_type = other RNA
ggtgggctggggttcagagagg

SEQ ID NO: 22905 - RNA, 22 nt, synthetic construct
  source 1..22: mol_type = other RNA
ggtggtgacgggggttttgccg

SEQ ID NO: 22906 - RNA, 22 nt, synthetic construct
  source 1..22: mol_type = other RNA
ggtggtttccgagcttgaccct

SEQ ID NO: 22907 - RNA, 22 nt, synthetic construct
  source 1..22: mol_type = other RNA
ggtgtcccagcaagtcgggact

SEQ ID NO: 22908 - RNA, 22 nt, synthetic construct
  source 1..22: mol_type = other RNA
ggtgtccgtgtggaaaactccc

SEQ ID NO: 22909 - RNA, 22 nt, synthetic construct
  source 1..22: mol_type = other RNA
ggtgtgcagctgtctcacccct

SEQ ID NO: 22910 - RNA, 22 nt, synthetic construct
  source 1..22: mol_type = other RNA
ggtgtggggtgaccagcttatg

SEQ ID NO: 22911 - RNA, 22 nt, synthetic construct
  source 1..22: mol_type = other RNA
ggtgttcaccaggtcgtggccg

SEQ ID NO: 22912 - RNA, 22 nt, synthetic construct
  source 1..22: mol_type = other RNA
ggttacgtggccaagaagcagg

SEQ ID NO: 22913 - RNA, 22 nt, synthetic construct
  source 1..22: mol_type = other RNA
ggttcagagaggagggattccc

SEQ ID NO: 22914 - RNA, 22 nt, synthetic construct
  source 1..22: mol_type = other RNA
ggttccagcccctcctccttca

SEQ ID NO: 22915 - RNA, 22 nt, synthetic construct
  source 1..22: mol_type = other RNA
ggttcccgcacccagatgagaa

SEQ ID NO: 22916 - RNA, 22 nt, synthetic construct
  source 1..22: mol_type = other RNA
ggttcctggctctgctcttcag

SEQ ID NO: 22917 - RNA, 22 nt, synthetic construct
  source 1..22: mol_type = other RNA
ggttctcagtggccaccctgcg

SEQ ID NO: 22918 - RNA, 22 nt, synthetic construct
  source 1..22: mol_type = other RNA
ggttctgggagagggtagcgca

SEQ ID NO: 22919 - RNA, 22 nt, synthetic construct
  source 1..22: mol_type = other RNA
ggttgaatggggaggggttggg

SEQ ID NO: 22920 - RNA, 22 nt, synthetic construct
  source 1..22: mol_type = other RNA
ggttgataaacccacgtggggt

SEQ ID NO: 22921 - RNA, 22 nt, synthetic construct
  source 1..22: mol_type = other RNA
ggttgcccagtggtcaggccgg

SEQ ID NO: 22922 - RNA, 22 nt, synthetic construct
  source 1..22: mol_type = other RNA
ggttgggcctggactctggagt

SEQ ID NO: 22923 - RNA, 22 nt, synthetic construct
  source 1..22: mol_type = other RNA
ggttgggggctagagtaggagg

SEQ ID NO: 22924 - RNA, 22 nt, synthetic construct
  source 1..22: mol_type = other RNA
ggttggtcactgtctctgggtg

SEQ ID NO: 22925 - RNA, 22 nt, synthetic construct
  source 1..22: mol_type = other RNA
ggtttaaggcaggaggggctgg

SEQ ID NO: 22926 - RNA, 22 nt, synthetic construct
  source 1..22: mol_type = other RNA
ggtttatcaaccacttggtgag

SEQ ID NO: 22927 - RNA, 22 nt, synthetic construct
  source 1..22: mol_type = other RNA
ggtttcagtgctaaaactaggc

SEQ ID NO: 22928 - RNA, 22 nt, synthetic construct
  source 1..22: mol_type = other RNA
ggtttccactgagcactgaagg

SEQ ID NO: 22929 - RNA, 22 nt, synthetic construct
  source 1..22: mol_type = other RNA
ggtttccgagcttgacccttgg

SEQ ID NO: 22930 - RNA, 22 nt, synthetic construct
  source 1..22: mol_type = other RNA
ggtttgagagaggaggggctgg

SEQ ID NO: 22931 - RNA, 22 nt, synthetic construct
  source 1..22: mol_type = other RNA
ggtttgagtccttggcaagccc

SEQ ID NO: 22932 - RNA, 22 nt, synthetic construct
  source 1..22: mol_type = other RNA
ggtttgggtcaggtctgggtgt

SEQ ID NO: 22933 - RNA, 22 nt, synthetic construct
  source 1..22: mol_type = other RNA
ggttttgccgtgtctaacaggt

SEQ ID NO: 22934 - RNA, 22 nt, synthetic construct
  source 1..22: mol_type = other RNA
gtaaaactgacgcacggaggaa

SEQ ID NO: 22935 - RNA, 22 nt, synthetic construct
  source 1..22: mol_type = other RNA
gtaacctgagaagggaatccct

SEQ ID NO: 22936 - RNA, 22 nt, synthetic construct
  source 1..22: mol_type = other RNA
gtaaggaagctgcagcaccagg

SEQ ID NO: 22937 - RNA, 22 nt, synthetic construct
  source 1..22: mol_type = other RNA
gtaatttatcccgtggatctag

SEQ ID NO: 22938 - RNA, 22 nt, synthetic construct
  source 1..22: mol_type = other RNA
gtacaggcatccctgtgaaaga

SEQ ID NO: 22939 - RNA, 22 nt, synthetic construct
  source 1..22: mol_type = other RNA
gtaccagcctcaccaagtggtt

SEQ ID NO: 22940 - RNA, 22 nt, synthetic construct
  source 1..22: mol_type = other RNA
gtaccatgtggggttcccgcac

SEQ ID NO: 22941 - RNA, 22 nt, synthetic construct
  source 1..22: mol_type = other RNA
gtaccccacgtgggtttatcaa

SEQ ID NO: 22942 - RNA, 22 nt, synthetic construct
  source 1..22: mol_type = other RNA
gtaccctaagaacttgggaaca

SEQ ID NO: 22943 - RNA, 22 nt, synthetic construct
  source 1..22: mol_type = other RNA
gtaccctgcccccattcctgca

SEQ ID NO: 22944 - RNA, 22 nt, synthetic construct
  source 1..22: mol_type = other RNA
gtacctgttagacacggcaaaa

SEQ ID NO: 22945 - RNA, 22 nt, synthetic construct
  source 1..22: mol_type = other RNA
gtactgggcaggtccttgaaag

SEQ ID NO: 22946 - RNA, 22 nt, synthetic construct
  source 1..22: mol_type = other RNA
gtagacagggctggggtggcct

SEQ ID NO: 22947 - RNA, 22 nt, synthetic construct
  source 1..22: mol_type = other RNA
gtagaggcggccacgacctggt

SEQ ID NO: 22948 - RNA, 22 nt, synthetic construct
  source 1..22: mol_type = other RNA
gtagccagccccgtcctggcag

SEQ ID NO: 22949 - RNA, 22 nt, synthetic construct
  source 1..22: mol_type = other RNA
gtagcgcagggtggccactgag

SEQ ID NO: 22950 - RNA, 22 nt, synthetic construct
  source 1..22: mol_type = other RNA
gtagctccctcccgcctcctcc

SEQ ID NO: 22951 - RNA, 22 nt, synthetic construct
  source 1..22: mol_type = other RNA
gtaggaggggctggagccagga

SEQ ID NO: 22952 - RNA, 22 nt, synthetic construct
  source 1..22: mol_type = other RNA
gtagggaaggggcaggagagcc

SEQ ID NO: 22953 - RNA, 22 nt, synthetic construct
  source 1..22: mol_type = other RNA
gtaggtggcctggggcctctgg

SEQ ID NO: 22954 - RNA, 22 nt, synthetic construct
  source 1..22: mol_type = other RNA
gtatcccaggaggcctggagca

SEQ ID NO: 22955 - RNA, 22 nt, synthetic construct
  source 1..22: mol_type = other RNA
gtatctgctggggtggtttccg

SEQ ID NO: 22956 - RNA, 22 nt, synthetic construct
  source 1..22: mol_type = other RNA
gtatcttaaacagccagtggcc

SEQ ID NO: 22957 - RNA, 22 nt, synthetic construct
  source 1..22: mol_type = other RNA
gtcaagctcggaaaccacccca

SEQ ID NO: 22958 - RNA, 22 nt, synthetic construct
  source 1..22: mol_type = other RNA
gtcacactccagttcactgagg

SEQ ID NO: 22959 - RNA, 22 nt, synthetic construct
  source 1..22: mol_type = other RNA
gtcaccacccacaggtggcgct

SEQ ID NO: 22960 - RNA, 22 nt, synthetic construct
  source 1..22: mol_type = other RNA
gtcacccagagacagtgaccaa

SEQ ID NO: 22961 - RNA, 22 nt, synthetic construct
  source 1..22: mol_type = other RNA
gtcaccccacacccagacctga

SEQ ID NO: 22962 - RNA, 22 nt, synthetic construct
  source 1..22: mol_type = other RNA
gtcaccccacagttggaggaga

SEQ ID NO: 22963 - RNA, 22 nt, synthetic construct
  source 1..22: mol_type = other RNA
gtcactgtctctgggtgactct

SEQ ID NO: 22964 - RNA, 22 nt, synthetic construct
  source 1..22: mol_type = other RNA
gtcagagcagctcaggttctgg

SEQ ID NO: 22965 - RNA, 22 nt, synthetic construct
  source 1..22: mol_type = other RNA
gtcagcccctggctgcagggcc

SEQ ID NO: 22966 - RNA, 22 nt, synthetic construct
  source 1..22: mol_type = other RNA
gtcaggccggccaggccttcag

SEQ ID NO: 22967 - RNA, 22 nt, synthetic construct
  source 1..22: mol_type = other RNA
gtcaggtctgggtgtggggtga

SEQ ID NO: 22968 - RNA, 22 nt, synthetic construct
  source 1..22: mol_type = other RNA
gtcagttttacctgtgagataa

SEQ ID NO: 22969 - RNA, 22 nt, synthetic construct
  source 1..22: mol_type = other RNA
gtcatggaaactcgggctgtga

SEQ ID NO: 22970 - RNA, 22 nt, synthetic construct
  source 1..22: mol_type = other RNA
gtcatggcgataggggaggggg

SEQ ID NO: 22971 - RNA, 22 nt, synthetic construct
  source 1..22: mol_type = other RNA
gtcattttccccactgtcctag

SEQ ID NO: 22972 - RNA, 22 nt, synthetic construct
  source 1..22: mol_type = other RNA
gtccaaaacttggggggacaaa

SEQ ID NO: 22973 - RNA, 22 nt, synthetic construct
  source 1..22: mol_type = other RNA
gtccacaaggcctggggcaagt

SEQ ID NO: 22974 - RNA, 22 nt, synthetic construct
  source 1..22: mol_type = other RNA
gtccaccatctcatgcccctgg

SEQ ID NO: 22975 - RNA, 22 nt, synthetic construct
  source 1..22: mol_type = other RNA
gtccaggccaagtaggtggcct

SEQ ID NO: 22976 - RNA, 22 nt, synthetic construct
  source 1..22: mol_type = other RNA
gtccaggcccaacccctcccca

SEQ ID NO: 22977 - RNA, 22 nt, synthetic construct
  source 1..22: mol_type = other RNA
gtccaggcccagccccgcctcc

SEQ ID NO: 22978 - RNA, 22 nt, synthetic construct
  source 1..22: mol_type = other RNA
gtccaggccccagcccctcctc

SEQ ID NO: 22979 - RNA, 22 nt, synthetic construct
  source 1..22: mol_type = other RNA
gtccaggcccccagcctctccc

SEQ ID NO: 22980 - RNA, 22 nt, synthetic construct
  source 1..22: mol_type = other RNA
gtccaggcccccagtccctcca

SEQ ID NO: 22981 - RNA, 22 nt, synthetic construct
  source 1..22: mol_type = other RNA
gtccagggggtcggaggaggga

SEQ ID NO: 22982 - RNA, 22 nt, synthetic construct
  source 1..22: mol_type = other RNA
gtcccagatagcactggggact

SEQ ID NO: 22983 - RNA, 22 nt, synthetic construct
  source 1..22: mol_type = other RNA
gtcccagcaagtcgggactcca

SEQ ID NO: 22984 - RNA, 22 nt, synthetic construct
  source 1..22: mol_type = other RNA
gtcccagcacagggtggccttc

SEQ ID NO: 22985 - RNA, 22 nt, synthetic construct
  source 1..22: mol_type = other RNA
gtccccaagcatcgcccccctg

SEQ ID NO: 22986 - RNA, 22 nt, synthetic construct
  source 1..22: mol_type = other RNA
gtccccaatttatattgttcct

SEQ ID NO: 22987 - RNA, 22 nt, synthetic construct
  source 1..22: mol_type = other RNA
gtccccagtgctatctgggaca

SEQ ID NO: 22988 - RNA, 22 nt, synthetic construct
  source 1..22: mol_type = other RNA
gtccccccaagttttggacccc

SEQ ID NO: 22989 - RNA, 22 nt, synthetic construct
  source 1..22: mol_type = other RNA
gtcccccttcctcgtccaccat

SEQ ID NO: 22990 - RNA, 22 nt, synthetic construct
  source 1..22: mol_type = other RNA
gtcccgcccaggcccctgagtc

SEQ ID NO: 22991 - RNA, 22 nt, synthetic construct
  source 1..22: mol_type = other RNA
gtcccgcttccctaaggccctg

SEQ ID NO: 22992 - RNA, 22 nt, synthetic construct
  source 1..22: mol_type = other RNA
gtcccggagcccacccagtgtc

SEQ ID NO: 22993 - RNA, 22 nt, synthetic construct
  source 1..22: mol_type = other RNA
gtccctcacctctccaaagctg

SEQ ID NO: 22994 - RNA, 22 nt, synthetic construct
  source 1..22: mol_type = other RNA
gtccctccaccctcagacccag

SEQ ID NO: 22995 - RNA, 22 nt, synthetic construct
  source 1..22: mol_type = other RNA
gtccctcctccgaccccctgga

SEQ ID NO: 22996 - RNA, 22 nt, synthetic construct
  source 1..22: mol_type = other RNA
gtccctggatctgttttcgtgg

SEQ ID NO: 22997 - RNA, 22 nt, synthetic construct
  source 1..22: mol_type = other RNA
gtccctggtgcccaggcctcag

SEQ ID NO: 22998 - RNA, 22 nt, synthetic construct
  source 1..22: mol_type = other RNA
gtccgtgtggaaaactcccttt

SEQ ID NO: 22999 - RNA, 22 nt, synthetic construct
  source 1..22: mol_type = other RNA
gtcctagcaccgtgtccctgga

SEQ ID NO: 23000 - RNA, 22 nt, synthetic construct
  source 1..22: mol_type = other RNA
gtcctaggaaaacagggatggt

SEQ ID NO: 23001 - RNA, 22 nt, synthetic construct
  source 1..22: mol_type = other RNA
gtcctaggtgttcaccaggtcg

SEQ ID NO: 23002 - RNA, 22 nt, synthetic construct
  source 1..22: mol_type = other RNA
gtcctgagttctaactttggct

SEQ ID NO: 23003 - RNA, 22 nt, synthetic construct
  source 1..22: mol_type = other RNA
gtcctgcatccttctccaggca

SEQ ID NO: 23004 - RNA, 22 nt, synthetic construct
  source 1..22: mol_type = other RNA
gtcctggcagggctgtggtgag

SEQ ID NO: 23005 - RNA, 22 nt, synthetic construct
  source 1..22: mol_type = other RNA
gtcctggcccccagcccctcct

SEQ ID NO: 23006 - RNA, 22 nt, synthetic construct
  source 1..22: mol_type = other RNA
gtcctgggcaaacagcataagc

SEQ ID NO: 23007 - RNA, 22 nt, synthetic construct
  source 1..22: mol_type = other RNA
gtccttccaagggtcaagctcg

SEQ ID NO: 23008 - RNA, 22 nt, synthetic construct
  source 1..22: mol_type = other RNA
gtccttgaaagggaaaggccca

SEQ ID NO: 23009 - RNA, 22 nt, synthetic construct
  source 1..22: mol_type = other RNA
gtccttggcaagcccaggagag

SEQ ID NO: 23010 - RNA, 22 nt, synthetic construct
  source 1..22: mol_type = other RNA
gtcctttcgtggtttccactga

SEQ ID NO: 23011 - RNA, 22 nt, synthetic construct
  source 1..22: mol_type = other RNA
gtcggaggagggacttgcccca

SEQ ID NO: 23012 - RNA, 22 nt, synthetic construct
  source 1..22: mol_type = other RNA
gtcgggactccagagggagcca

SEQ ID NO: 23013 - RNA, 22 nt, synthetic construct
  source 1..22: mol_type = other RNA
gtcgtggccgcctctactccct

SEQ ID NO: 23014 - RNA, 22 nt, synthetic construct
  source 1..22: mol_type = other RNA
gtctaacaggtaccatgtgggg

SEQ ID NO: 23015 - RNA, 22 nt, synthetic construct
  source 1..22: mol_type = other RNA
gtctaccaggctgccttttggg

SEQ ID NO: 23016 - RNA, 22 nt, synthetic construct
  source 1..22: mol_type = other RNA
gtctcacccctctgggagtccc

SEQ ID NO: 23017 - RNA, 22 nt, synthetic construct
  source 1..22: mol_type = other RNA
gtctctgggtgactcttgattc

SEQ ID NO: 23018 - RNA, 22 nt, synthetic construct
  source 1..22: mol_type = other RNA
gtctgaagagcagagccaggaa

SEQ ID NO: 23019 - RNA, 22 nt, synthetic construct
  source 1..22: mol_type = other RNA
gtctgaatggggagaggctggg

SEQ ID NO: 23020 - RNA, 22 nt, synthetic construct
  source 1..22: mol_type = other RNA
gtctgagcactggaagcgccac

SEQ ID NO: 23021 - RNA, 22 nt, synthetic construct
  source 1..22: mol_type = other RNA
gtctgagggtggagggactggg

SEQ ID NO: 23022 - RNA, 22 nt, synthetic construct
  source 1..22: mol_type = other RNA
gtctgggtgtggggtgaccagc

SEQ ID NO: 23023 - RNA, 22 nt, synthetic construct
  source 1..22: mol_type = other RNA
gtctggtgcgtttcactgatcc

SEQ ID NO: 23024 - RNA, 22 nt, synthetic construct
  source 1..22: mol_type = other RNA
gtctgtcccagcacagggtggc

SEQ ID NO: 23025 - RNA, 22 nt, synthetic construct
  source 1..22: mol_type = other RNA
gtcttagggaggcggggctggg

SEQ ID NO: 23026 - RNA, 22 nt, synthetic construct
  source 1..22: mol_type = other RNA
gtgaaacgcaccagacggccgc

SEQ ID NO: 23027 - RNA, 22 nt, synthetic construct
  source 1..22: mol_type = other RNA
gtgaaagatgcctgaggcctgg

SEQ ID NO: 23028 - RNA, 22 nt, synthetic construct
  source 1..22: mol_type = other RNA
gtgaacacctaggacgcaccat

SEQ ID NO: 23029 - RNA, 22 nt, synthetic construct
  source 1..22: mol_type = other RNA
gtgaacggggaagggagggggc

SEQ ID NO: 23030 - RNA, 22 nt, synthetic construct
  source 1..22: mol_type = other RNA
gtgaactggagtgtgacagcct

SEQ ID NO: 23031 - RNA, 22 nt, synthetic construct
  source 1..22: mol_type = other RNA
gtgaagagccaaagttagaact

SEQ ID NO: 23032 - RNA, 22 nt, synthetic construct
  source 1..22: mol_type = other RNA
gtgaagctaaactcctagatcc

SEQ ID NO: 23033 - RNA, 22 nt, synthetic construct
  source 1..22: mol_type = other RNA
gtgaaggggccgcacgtgccct

SEQ ID NO: 23034 - RNA, 22 nt, synthetic construct
  source 1..22: mol_type = other RNA
gtgacagcctggggcccaggca

SEQ ID NO: 23035 - RNA, 22 nt, synthetic construct
  source 1..22: mol_type = other RNA
gtgaccaaccatccctgttttc

SEQ ID NO: 23036 - RNA, 22 nt, synthetic construct
  source 1..22: mol_type = other RNA
gtgaccagcttatgctgtttgc

SEQ ID NO: 23037 - RNA, 22 nt, synthetic construct
  source 1..22: mol_type = other RNA
gtgacctgcccggttctcagtg

SEQ ID NO: 23038 - RNA, 22 nt, synthetic construct
  source 1..22: mol_type = other RNA
gtgacgggggttttgccgtgtc

SEQ ID NO: 23039 - RNA, 22 nt, synthetic construct
  source 1..22: mol_type = other RNA
gtgactcttgattcccggccag

SEQ ID NO: 23040 - RNA, 22 nt, synthetic construct
  source 1..22: mol_type = other RNA
gtgactgcttggcaaactcact

SEQ ID NO: 23041 - RNA, 22 nt, synthetic construct
  source 1..22: mol_type = other RNA
gtgagaatggtgcgtcctaggt

SEQ ID NO: 23042 - RNA, 22 nt, synthetic construct
  source 1..22: mol_type = other RNA
gtgagacagctgcacacctgtg

SEQ ID NO: 23043 - RNA, 22 nt, synthetic construct
  source 1..22: mol_type = other RNA
gtgagataaggccagtagccag

SEQ ID NO: 23044 - RNA, 22 nt, synthetic construct
  source 1..22: mol_type = other RNA
gtgaggaggggggtgtccgtgt

SEQ ID NO: 23045 - RNA, 22 nt, synthetic construct
  source 1..22: mol_type = other RNA
gtgaggctggtaccctgccccc

SEQ ID NO: 23046 - RNA, 22 nt, synthetic construct
  source 1..22: mol_type = other RNA
gtgagggacttggggggtaatt

SEQ ID NO: 23047 - RNA, 22 nt, synthetic construct
  source 1..22: mol_type = other RNA
gtgagtttgccaagcagtcacc

SEQ ID NO: 23048 - RNA, 22 nt, synthetic construct
  source 1..22: mol_type = other RNA
gtgcagagggggcctcagtgaa

SEQ ID NO: 23049 - RNA, 22 nt, synthetic construct
  source 1..22: mol_type = other RNA
gtgcagctgtctcacccctctg

SEQ ID NO: 23050 - RNA, 22 nt, synthetic construct
  source 1..22: mol_type = other RNA
gtgcaggaatgggggcagggta

SEQ ID NO: 23051 - RNA, 22 nt, synthetic construct
  source 1..22: mol_type = other RNA
gtgcccaggcctcaggcatctt

SEQ ID NO: 23052 - RNA, 22 nt, synthetic construct
  source 1..22: mol_type = other RNA
gtgccctgggaacgggatgaac

SEQ ID NO: 23053 - RNA, 22 nt, synthetic construct
  source 1..22: mol_type = other RNA
gtgcctgggccccaggctgtca

SEQ ID NO: 23054 - RNA, 22 nt, synthetic construct
  source 1..22: mol_type = other RNA
gtgcggccccttcacagcccga

SEQ ID NO: 23055 - RNA, 22 nt, synthetic construct
  source 1..22: mol_type = other RNA
gtgcgggaaccccacatggtac

SEQ ID NO: 23056 - RNA, 22 nt, synthetic construct
  source 1..22: mol_type = other RNA
gtgcgtcagttttacctgtgag

SEQ ID NO: 23057 - RNA, 22 nt, synthetic construct
  source 1..22: mol_type = other RNA
gtgcgtcctaggtgttcaccag

SEQ ID NO: 23058 - RNA, 22 nt, synthetic construct
  source 1..22: mol_type = other RNA
gtgcgtttcactgatcctggtg

SEQ ID NO: 23059 - RNA, 22 nt, synthetic construct
  source 1..22: mol_type = other RNA
gtgctaaaactaggctgtcctg

SEQ ID NO: 23060 - RNA, 22 nt, synthetic construct
  source 1..22: mol_type = other RNA
gtgctaggacagtggggaaaat

SEQ ID NO: 23061 - RNA, 22 nt, synthetic construct
  source 1..22: mol_type = other RNA
gtgctatctgggacatattcct

SEQ ID NO: 23062 - RNA, 22 nt, synthetic construct
  source 1..22: mol_type = other RNA
gtgctcagactagggaagaggt

SEQ ID NO: 23063 - RNA, 22 nt, synthetic construct
  source 1..22: mol_type = other RNA
gtgctcagtggaaaccacgaaa

SEQ ID NO: 23064 - RNA, 22 nt, synthetic construct
  source 1..22: mol_type = other RNA
gtgctgcagcttccttacactt

SEQ ID NO: 23065 - RNA, 22 nt, synthetic construct
  source 1..22: mol_type = other RNA
gtgctgggacagactcaggggc

SEQ ID NO: 23066 - RNA, 22 nt, synthetic construct
  source 1..22: mol_type = other RNA
gtggaaaactccctttgtgaga

SEQ ID NO: 23067 - RNA, 22 nt, synthetic construct
  source 1..22: mol_type = other RNA
gtggaaaccacgaaaggactcc

SEQ ID NO: 23068 - RNA, 22 nt, synthetic construct
  source 1..22: mol_type = other RNA
gtggaaataaacgagccgagtt

SEQ ID NO: 23069 - RNA, 22 nt, synthetic construct
  source 1..22: mol_type = other RNA
gtggacactgggtgggctccgg

SEQ ID NO: 23070 - RNA, 22 nt, synthetic construct
  source 1..22: mol_type = other RNA
gtggacgaggaagggggacagg

SEQ ID NO: 23071 - RNA, 22 nt, synthetic construct
  source 1..22: mol_type = other RNA
gtggagaaactggccgggaatc

SEQ ID NO: 23072 - RNA, 22 nt, synthetic construct
  source 1..22: mol_type = other RNA
gtggaggaaggccaccctgtgc

SEQ ID NO: 23073 - RNA, 22 nt, synthetic construct
  source 1..22: mol_type = other RNA
gtggagggactgggggcctgga

SEQ ID NO: 23074 - RNA, 22 nt, synthetic construct
  source 1..22: mol_type = other RNA
gtggatctaggagtttagcttc

SEQ ID NO: 23075 - RNA, 22 nt, synthetic construct
  source 1..22: mol_type = other RNA
gtggattctcctccaactgtgg

SEQ ID NO: 23076 - RNA, 22 nt, synthetic construct
  source 1..22: mol_type = other RNA
gtggccaagaagcaggggagct

SEQ ID NO: 23077 - RNA, 22 nt, synthetic construct
  source 1..22: mol_type = other RNA
gtggccaccctgcgctaccctc

SEQ ID NO: 23078 - RNA, 22 nt, synthetic construct
  source 1..22: mol_type = other RNA
gtggccactgagaaccgggcag

SEQ ID NO: 23079 - RNA, 22 nt, synthetic construct
  source 1..22: mol_type = other RNA
gtggccagaggctgttgggtca

SEQ ID NO: 23080 - RNA, 22 nt, synthetic construct
  source 1..22: mol_type = other RNA
gtggcccgtgtcagcccctggc

SEQ ID NO: 23081 - RNA, 22 nt, synthetic construct
  source 1..22: mol_type = other RNA
gtggccgcctctactccctttc

SEQ ID NO: 23082 - RNA, 22 nt, synthetic construct
  source 1..22: mol_type = other RNA
gtggcctctcgtggggtccagg

SEQ ID NO: 23083 - RNA, 22 nt, synthetic construct
  source 1..22: mol_type = other RNA
gtggcctggggcctctggggga

SEQ ID NO: 23084 - RNA, 22 nt, synthetic construct
  source 1..22: mol_type = other RNA
gtggccttcctccaccctgcat

SEQ ID NO: 23085 - RNA, 22 nt, synthetic construct
  source 1..22: mol_type = other RNA
gtggcgcttccagtgctcagac

SEQ ID NO: 23086 - RNA, 22 nt, synthetic construct
  source 1..22: mol_type = other RNA
gtggctagggggttgggggcta

SEQ ID NO: 23087 - RNA, 22 nt, synthetic construct
  source 1..22: mol_type = other RNA
gtggctccctctggagtcccga

SEQ ID NO: 23088 - RNA, 22 nt, synthetic construct
  source 1..22: mol_type = other RNA
gtggctgttcccaagttcttag

SEQ ID NO: 23089 - RNA, 22 nt, synthetic construct
  source 1..22: mol_type = other RNA
gtgggcccagggctatgcaggg

SEQ ID NO: 23090 - RNA, 22 nt, synthetic construct
  source 1..22: mol_type = other RNA
gtgggctccgggacctgaactg

SEQ ID NO: 23091 - RNA, 22 nt, synthetic construct
  source 1..22: mol_type = other RNA
gtgggctggggttcagagagga

SEQ ID NO: 23092 - RNA, 22 nt, synthetic construct
  source 1..22: mol_type = other RNA
gtggggaaaatgacccaacagc

SEQ ID NO: 23093 - RNA, 22 nt, synthetic construct
  source 1..22: mol_type = other RNA
gtggggtaccctaagaacttgg

SEQ ID NO: 23094 - RNA, 22 nt, synthetic construct
  source 1..22: mol_type = other RNA
gtggggtccaggccaagtaggt

SEQ ID NO: 23095 - RNA, 22 nt, synthetic construct
  source 1..22: mol_type = other RNA
gtggggtgaccagcttatgctg

SEQ ID NO: 23096 - RNA, 22 nt, synthetic construct
  source 1..22: mol_type = other RNA
gtggggtgactgcttggcaaac

SEQ ID NO: 23097 - RNA, 22 nt, synthetic construct
  source 1..22: mol_type = other RNA
gtggggttcccgcacccagatg

SEQ ID NO: 23098 - RNA, 22 nt, synthetic construct
  source 1..22: mol_type = other RNA
gtgggtggtgacgggggttttg

SEQ ID NO: 23099 - RNA, 22 nt, synthetic construct
  source 1..22: mol_type = other RNA
gtgggtttatcaaccacttggt

SEQ ID NO: 23100 - RNA, 22 nt, synthetic construct
  source 1..22: mol_type = other RNA
gtggtcaggccggccaggcctt

SEQ ID NO: 23101 - RNA, 22 nt, synthetic construct
  source 1..22: mol_type = other RNA
gtggtgacgggggttttgccgt

SEQ ID NO: 23102 - RNA, 22 nt, synthetic construct
  source 1..22: mol_type = other RNA
gtggtgaggaggggggtgtccg

SEQ ID NO: 23103 - RNA, 22 nt, synthetic construct
  source 1..22: mol_type = other RNA
gtggttgataaacccacgtggg

SEQ ID NO: 23104 - RNA, 22 nt, synthetic construct
  source 1..22: mol_type = other RNA
gtggtttccactgagcactgaa

SEQ ID NO: 23105 - RNA, 22 nt, synthetic construct
  source 1..22: mol_type = other RNA
gtggtttccgagcttgaccctt

SEQ ID NO: 23106 - RNA, 22 nt, synthetic construct
  source 1..22: mol_type = other RNA
gtgtaaggaagctgcagcacca

SEQ ID NO: 23107 - RNA, 22 nt, synthetic construct
  source 1..22: mol_type = other RNA
gtgtcagcccctggctgcaggg

SEQ ID NO: 23108 - RNA, 22 nt, synthetic construct
  source 1..22: mol_type = other RNA
gtgtccacaaggcctggggcaa

SEQ ID NO: 23109 - RNA, 22 nt, synthetic construct
  source 1..22: mol_type = other RNA
gtgtcccagcaagtcgggactc

SEQ ID NO: 23110 - RNA, 22 nt, synthetic construct
  source 1..22: mol_type = other RNA
gtgtccctggatctgttttcgt

SEQ ID NO: 23111 - RNA, 22 nt, synthetic construct
  source 1..22: mol_type = other RNA
gtgtccgtgtggaaaactccct

SEQ ID NO: 23112 - RNA, 22 nt, synthetic construct
  source 1..22: mol_type = other RNA
gtgtctaacaggtaccatgtgg

SEQ ID NO: 23113 - RNA, 22 nt, synthetic construct
  source 1..22: mol_type = other RNA
gtgtgacagcctggggcccagg

SEQ ID NO: 23114 - RNA, 22 nt, synthetic construct
  source 1..22: mol_type = other RNA
gtgtgcagctgtctcacccctc

SEQ ID NO: 23115 - RNA, 22 nt, synthetic construct
  source 1..22: mol_type = other RNA
gtgtgcctgggccccaggctgt

SEQ ID NO: 23116 - RNA, 22 nt, synthetic construct
  source 1..22: mol_type = other RNA
gtgtggaaaactccctttgtga

SEQ ID NO: 23117 - RNA, 22 nt, synthetic construct
  source 1..22: mol_type = other RNA
gtgtggggtgaccagcttatgc

SEQ ID NO: 23118 - RNA, 22 nt, synthetic construct
  source 1..22: mol_type = other RNA
gtgttcaccaggtcgtggccgc

SEQ ID NO: 23119 - RNA, 22 nt, synthetic construct
  source 1..22: mol_type = other RNA
gtgtttctcgtcctgcatcctt

SEQ ID NO: 23120 - RNA, 22 nt, synthetic construct
  source 1..22: mol_type = other RNA
gttacgtggccaagaagcaggg

SEQ ID NO: 23121 - RNA, 22 nt, synthetic construct
  source 1..22: mol_type = other RNA
gttagaactcaggaccaactta

SEQ ID NO: 23122 - RNA, 22 nt, synthetic construct
  source 1..22: mol_type = other RNA
gttagacacggcaaaacccccg

SEQ ID NO: 23123 - RNA, 22 nt, synthetic construct
  source 1..22: mol_type = other RNA
gttcaccaggtcgtggccgcct

SEQ ID NO: 23124 - RNA, 22 nt, synthetic construct
  source 1..22: mol_type = other RNA
gttcactgaggccccctctgca

SEQ ID NO: 23125 - RNA, 22 nt, synthetic construct
  source 1..22: mol_type = other RNA
gttcacttcctgtttgcagata

SEQ ID NO: 23126 - RNA, 22 nt, synthetic construct
  source 1..22: mol_type = other RNA
gttcagagaggagggattccct

SEQ ID NO: 23127 - RNA, 22 nt, synthetic construct
  source 1..22: mol_type = other RNA
gttcagccctaagaatcctggc

SEQ ID NO: 23128 - RNA, 22 nt, synthetic construct
  source 1..22: mol_type = other RNA
gttcaggtcccggagcccaccc

SEQ ID NO: 23129 - RNA, 22 nt, synthetic construct
  source 1..22: mol_type = other RNA
gttcatcccgttcccagggcac

SEQ ID NO: 23130 - RNA, 22 nt, synthetic construct
  source 1..22: mol_type = other RNA
gttccagcccctcctccttcag

SEQ ID NO: 23131 - RNA, 22 nt, synthetic construct
  source 1..22: mol_type = other RNA
gttcccaagttcttagggtacc

SEQ ID NO: 23132 - RNA, 22 nt, synthetic construct
  source 1..22: mol_type = other RNA
gttcccagggcacgtgcggccc

SEQ ID NO: 23133 - RNA, 22 nt, synthetic construct
  source 1..22: mol_type = other RNA
gttcccctgcatcccccttccc

SEQ ID NO: 23134 - RNA, 22 nt, synthetic construct
  source 1..22: mol_type = other RNA
gttcccctgcatccccgttccc

SEQ ID NO: 23135 - RNA, 22 nt, synthetic construct
  source 1..22: mol_type = other RNA
gttcccgcacccagatgagaag

SEQ ID NO: 23136 - RNA, 22 nt, synthetic construct
  source 1..22: mol_type = other RNA
gttcctccgtgcgtcagtttta

SEQ ID NO: 23137 - RNA, 22 nt, synthetic construct
  source 1..22: mol_type = other RNA
gttcctgcagagtatctgctgg

SEQ ID NO: 23138 - RNA, 22 nt, synthetic construct
  source 1..22: mol_type = other RNA
gttcctggctctgctcttcaga

SEQ ID NO: 23139 - RNA, 22 nt, synthetic construct
  source 1..22: mol_type = other RNA
gttctaactttggctcttcacc

SEQ ID NO: 23140 - RNA, 22 nt, synthetic construct
  source 1..22: mol_type = other RNA
gttctcagtggccaccctgcgc

SEQ ID NO: 23141 - RNA, 22 nt, synthetic construct
  source 1..22: mol_type = other RNA
gttctgggagagggtagcgcag

SEQ ID NO: 23142 - RNA, 22 nt, synthetic construct
  source 1..22: mol_type = other RNA
gttcttagggtaccccacgtgg

SEQ ID NO: 23143 - RNA, 22 nt, synthetic construct
  source 1..22: mol_type = other RNA
gttgaatggggaggggttgggc

SEQ ID NO: 23144 - RNA, 22 nt, synthetic construct
  source 1..22: mol_type = other RNA
gttgataaacccacgtggggta

SEQ ID NO: 23145 - RNA, 22 nt, synthetic construct
  source 1..22: mol_type = other RNA
gttgcccagtggtcaggccggc

SEQ ID NO: 23146 - RNA, 22 nt, synthetic construct
  source 1..22: mol_type = other RNA
gttggaggagaatccacccaaa

SEQ ID NO: 23147 - RNA, 22 nt, synthetic construct
  source 1..22: mol_type = other RNA
gttgggcctggactctggagtc

SEQ ID NO: 23148 - RNA, 22 nt, synthetic construct
  source 1..22: mol_type = other RNA
gttgggggctagagtaggaggg

SEQ ID NO: 23149 - RNA, 22 nt, synthetic construct
  source 1..22: mol_type = other RNA
gttgggtcattttccccactgt

SEQ ID NO: 23150 - RNA, 22 nt, synthetic construct
  source 1..22: mol_type = other RNA
gttggtcactgtctctgggtga

SEQ ID NO: 23151 - RNA, 22 nt, synthetic construct
  source 1..22: mol_type = other RNA
gttggtcctgagttctaacttt

SEQ ID NO: 23152 - RNA, 22 nt, synthetic construct
  source 1..22: mol_type = other RNA
gttgtcatggcgataggggagg

SEQ ID NO: 23153 - RNA, 22 nt, synthetic construct
  source 1..22: mol_type = other RNA
gtttaagatacgcctggttgcc

SEQ ID NO: 23154 - RNA, 22 nt, synthetic construct
  source 1..22: mol_type = other RNA
gtttaaggcaggaggggctggg

SEQ ID NO: 23155 - RNA, 22 nt, synthetic construct
  source 1..22: mol_type = other RNA
gtttagcttcactccttcctca

SEQ ID NO: 23156 - RNA, 22 nt, synthetic construct
  source 1..22: mol_type = other RNA
gtttatcaaccacttggtgagg

SEQ ID NO: 23157 - RNA, 22 nt, synthetic construct
  source 1..22: mol_type = other RNA
gtttatttccacccagttgtca

SEQ ID NO: 23158 - RNA, 22 nt, synthetic construct
  source 1..22: mol_type = other RNA
gtttcactgatcctggtgctgc

SEQ ID NO: 23159 - RNA, 22 nt, synthetic construct
  source 1..22: mol_type = other RNA
gtttcagtgctaaaactaggct

SEQ ID NO: 23160 - RNA, 22 nt, synthetic construct
  source 1..22: mol_type = other RNA
gtttccactgagcactgaaggc

SEQ ID NO: 23161 - RNA, 22 nt, synthetic construct
  source 1..22: mol_type = other RNA
gtttccatgacctcatgctctt

SEQ ID NO: 23162 - RNA, 22 nt, synthetic construct
  source 1..22: mol_type = other RNA
gtttccgagcttgacccttgga

SEQ ID NO: 23163 - RNA, 22 nt, synthetic construct
  source 1..22: mol_type = other RNA
gtttctcattcttcccttaggg

SEQ ID NO: 23164 - RNA, 22 nt, synthetic construct
  source 1..22: mol_type = other RNA
gtttctccacctggggctgtgt

SEQ ID NO: 23165 - RNA, 22 nt, synthetic construct
  source 1..22: mol_type = other RNA
gtttctcgtcctgcatccttct

SEQ ID NO: 23166 - RNA, 22 nt, synthetic construct
  source 1..22: mol_type = other RNA
gtttgagagaggaggggctggg

SEQ ID NO: 23167 - RNA, 22 nt, synthetic construct
  source 1..22: mol_type = other RNA
gtttgagtccttggcaagccca

SEQ ID NO: 23168 - RNA, 22 nt, synthetic construct
  source 1..22: mol_type = other RNA
gtttgcagatagccaggagtcc

SEQ ID NO: 23169 - RNA, 22 nt, synthetic construct
  source 1..22: mol_type = other RNA
gtttgccaagcagtcaccccac

SEQ ID NO: 23170 - RNA, 22 nt, synthetic construct
  source 1..22: mol_type = other RNA
gtttgcccaggacagcctagtt

SEQ ID NO: 23171 - RNA, 22 nt, synthetic construct
  source 1..22: mol_type = other RNA
gtttggaaaaacaaaatcagaa

SEQ ID NO: 23172 - RNA, 22 nt, synthetic construct
  source 1..22: mol_type = other RNA
gtttgggtcaggtctgggtgtg

SEQ ID NO: 23173 - RNA, 22 nt, synthetic construct
  source 1..22: mol_type = other RNA
gttttacctgtgagataaggcc

SEQ ID NO: 23174 - RNA, 22 nt, synthetic construct
  source 1..22: mol_type = other RNA
gttttagcactgaaaccctcag

SEQ ID NO: 23175 - RNA, 22 nt, synthetic construct
  source 1..22: mol_type = other RNA
gttttccacacggacacccccc

SEQ ID NO: 23176 - RNA, 22 nt, synthetic construct
  source 1..22: mol_type = other RNA
gttttcctaggactgagggttt

SEQ ID NO: 23177 - RNA, 22 nt, synthetic construct
  source 1..22: mol_type = other RNA
gttttcgtggctccctctggag

SEQ ID NO: 23178 - RNA, 22 nt, synthetic construct
  source 1..22: mol_type = other RNA
gttttgccgtgtctaacaggta

SEQ ID NO: 23179 - RNA, 22 nt, synthetic construct
  source 1..22: mol_type = other RNA
gttttggacccctaagggaaga

SEQ ID NO: 23180 - RNA, 22 nt, synthetic construct
  source 1..22: mol_type = other RNA
gtttttccaaactgcttctcct

SEQ ID NO: 23181 - RNA, 22 nt, synthetic construct
  source 1..22: mol_type = other RNA
taaaactaggctgtcctgggca

SEQ ID NO: 23182 - RNA, 22 nt, synthetic construct
  source 1..22: mol_type = other RNA
taaaactgacgcacggaggaac

SEQ ID NO: 23183 - RNA, 22 nt, synthetic construct
  source 1..22: mol_type = other RNA
taaacagccagtggccagaggc

SEQ ID NO: 23184 - RNA, 22 nt, synthetic construct
  source 1..22: mol_type = other RNA
taaacccacgtggggtacccta

SEQ ID NO: 23185 - RNA, 22 nt, synthetic construct
  source 1..22: mol_type = other RNA
taaacccagccaggtccttcca

SEQ ID NO: 23186 - RNA, 22 nt, synthetic construct
  source 1..22: mol_type = other RNA
taaacgagccgagttcatcccg

SEQ ID NO: 23187 - RNA, 22 nt, synthetic construct
  source 1..22: mol_type = other RNA
taaactcctagatccacgggat

SEQ ID NO: 23188 - RNA, 22 nt, synthetic construct
  source 1..22: mol_type = other RNA
taaagagtccccagtgctatct

SEQ ID NO: 23189 - RNA, 22 nt, synthetic construct
  source 1..22: mol_type = other RNA
taaattaccccccaagtccctc

SEQ ID NO: 23190 - RNA, 22 nt, synthetic construct
  source 1..22: mol_type = other RNA
taaattggggactagaaaggtg

SEQ ID NO: 23191 - RNA, 22 nt, synthetic construct
  source 1..22: mol_type = other RNA
taacaggtaccatgtggggttc

SEQ ID NO: 23192 - RNA, 22 nt, synthetic construct
  source 1..22: mol_type = other RNA
taacctgagaagggaatccctc

SEQ ID NO: 23193 - RNA, 22 nt, synthetic construct
  source 1..22: mol_type = other RNA
taactttggctcttcacctttc

SEQ ID NO: 23194 - RNA, 22 nt, synthetic construct
  source 1..22: mol_type = other RNA
taagaacttgggaacagccaca

SEQ ID NO: 23195 - RNA, 22 nt, synthetic construct
  source 1..22: mol_type = other RNA
taagaatcctggctccagcccc

SEQ ID NO: 23196 - RNA, 22 nt, synthetic construct
  source 1..22: mol_type = other RNA
taagacccagaagtccaggccc

SEQ ID NO: 23197 - RNA, 22 nt, synthetic construct
  source 1..22: mol_type = other RNA
taagatacgcctggttgcccag

SEQ ID NO: 23198 - RNA, 22 nt, synthetic construct
  source 1..22: mol_type = other RNA
taagctggtcaccccacaccca

SEQ ID NO: 23199 - RNA, 22 nt, synthetic construct
  source 1..22: mol_type = other RNA
taaggaaagaaggatggagaaa

SEQ ID NO: 23200 - RNA, 22 nt, synthetic construct
  source 1..22: mol_type = other RNA
taaggaagctgcagcaccagga

SEQ ID NO: 23201 - RNA, 22 nt, synthetic construct
  source 1..22: mol_type = other RNA
taaggcaattggggtgcaggaa

SEQ ID NO: 23202 - RNA, 22 nt, synthetic construct
  source 1..22: mol_type = other RNA
taaggcaggaggggctgggggc

SEQ ID NO: 23203 - RNA, 22 nt, synthetic construct
  source 1..22: mol_type = other RNA
taaggccagtagccagccccgt

SEQ ID NO: 23204 - RNA, 22 nt, synthetic construct
  source 1..22: mol_type = other RNA
taaggccctgctctgggcttct

SEQ ID NO: 23205 - RNA, 22 nt, synthetic construct
  source 1..22: mol_type = other RNA
taagggaagaatgagaaacggt

SEQ ID NO: 23206 - RNA, 22 nt, synthetic construct
  source 1..22: mol_type = other RNA
taagttggtcctgagttctaac

SEQ ID NO: 23207 - RNA, 22 nt, synthetic construct
  source 1..22: mol_type = other RNA
taatttatcccgtggatctagg

SEQ ID NO: 23208 - RNA, 22 nt, synthetic construct
  source 1..22: mol_type = other RNA
tacacttcccaagaggagaagc

SEQ ID NO: 23209 - RNA, 22 nt, synthetic construct
  source 1..22: mol_type = other RNA
tacaggcatccctgtgaaagat

SEQ ID NO: 23210 - RNA, 22 nt, synthetic construct
  source 1..22: mol_type = other RNA
tacaggggttcctggctctgct

SEQ ID NO: 23211 - RNA, 22 nt, synthetic construct
  source 1..22: mol_type = other RNA
taccagcctcaccaagtggttg

SEQ ID NO: 23212 - RNA, 22 nt, synthetic construct
  source 1..22: mol_type = other RNA
taccaggctgccttttgggtgg

SEQ ID NO: 23213 - RNA, 22 nt, synthetic construct
  source 1..22: mol_type = other RNA
taccatgtggggttcccgcacc

SEQ ID NO: 23214 - RNA, 22 nt, synthetic construct
  source 1..22: mol_type = other RNA
taccccacgtgggtttatcaac

SEQ ID NO: 23215 - RNA, 22 nt, synthetic construct
  source 1..22: mol_type = other RNA
taccccccaagtccctcacctc

SEQ ID NO: 23216 - RNA, 22 nt, synthetic construct
  source 1..22: mol_type = other RNA
taccccgaagagtgagtttgcc

SEQ ID NO: 23217 - RNA, 22 nt, synthetic construct
  source 1..22: mol_type = other RNA
taccctaagaacttgggaacag

SEQ ID NO: 23218 - RNA, 22 nt, synthetic construct
  source 1..22: mol_type = other RNA
taccctctcccagaacctgagc

SEQ ID NO: 23219 - RNA, 22 nt, synthetic construct
  source 1..22: mol_type = other RNA
taccctgcccccattcctgcac

SEQ ID NO: 23220 - RNA, 22 nt, synthetic construct
  source 1..22: mol_type = other RNA
tacctgtgagataaggccagta

SEQ ID NO: 23221 - RNA, 22 nt, synthetic construct
  source 1..22: mol_type = other RNA
tacctgttagacacggcaaaac

SEQ ID NO: 23222 - RNA, 22 nt, synthetic construct
  source 1..22: mol_type = other RNA
tacgagggccaagagcatgagg

SEQ ID NO: 23223 - RNA, 22 nt, synthetic construct
  source 1..22: mol_type = other RNA
tacgcctggttgcccagtggtc

SEQ ID NO: 23224 - RNA, 22 nt, synthetic construct
  source 1..22: mol_type = other RNA
tacgtggccaagaagcagggga

SEQ ID NO: 23225 - RNA, 22 nt, synthetic construct
  source 1..22: mol_type = other RNA
tactccctttctctttctccat

SEQ ID NO: 23226 - RNA, 22 nt, synthetic construct
  source 1..22: mol_type = other RNA
tactctagcccccaacccccta

SEQ ID NO: 23227 - RNA, 22 nt, synthetic construct
  source 1..22: mol_type = other RNA
tactctgcaggaacgaagccgt

SEQ ID NO: 23228 - RNA, 22 nt, synthetic construct
  source 1..22: mol_type = other RNA
tactggccttatctcacaggta

SEQ ID NO: 23229 - RNA, 22 nt, synthetic construct
  source 1..22: mol_type = other RNA
tactgggcaggtccttgaaagg

SEQ ID NO: 23230 - RNA, 22 nt, synthetic construct
  source 1..22: mol_type = other RNA
tacttggcctggaccccacgag

SEQ ID NO: 23231 - RNA, 22 nt, synthetic construct
  source 1..22: mol_type = other RNA
tagaaaggtgaagagccaaagt

SEQ ID NO: 23232 - RNA, 22 nt, synthetic construct
  source 1..22: mol_type = other RNA
tagaactcaggaccaacttatt

SEQ ID NO: 23233 - RNA, 22 nt, synthetic construct
  source 1..22: mol_type = other RNA
tagacacggcaaaacccccgtc

SEQ ID NO: 23234 - RNA, 22 nt, synthetic construct
  source 1..22: mol_type = other RNA
tagacagggctggggtggcctc

SEQ ID NO: 23235 - RNA, 22 nt, synthetic construct
  source 1..22: mol_type = other RNA
tagaggcggccacgacctggtg

SEQ ID NO: 23236 - RNA, 22 nt, synthetic construct
  source 1..22: mol_type = other RNA
tagagtaggaggggctggagcc

SEQ ID NO: 23237 - RNA, 22 nt, synthetic construct
  source 1..22: mol_type = other RNA
tagatccacgggataaattacc

SEQ ID NO: 23238 - RNA, 22 nt, synthetic construct
  source 1..22: mol_type = other RNA
tagcaccgtgtccctggatctg

SEQ ID NO: 23239 - RNA, 22 nt, synthetic construct
  source 1..22: mol_type = other RNA
tagcactgaaaccctcagtcct

SEQ ID NO: 23240 - RNA, 22 nt, synthetic construct
  source 1..22: mol_type = other RNA
tagcactggggactctttaagg

SEQ ID NO: 23241 - RNA, 22 nt, synthetic construct
  source 1..22: mol_type = other RNA
tagccactaaggcaattggggt

SEQ ID NO: 23242 - RNA, 22 nt, synthetic construct
  source 1..22: mol_type = other RNA
tagccagccccgtcctggcagg

SEQ ID NO: 23243 - RNA, 22 nt, synthetic construct
  source 1..22: mol_type = other RNA
tagccaggagtcctttcgtggt

SEQ ID NO: 23244 - RNA, 22 nt, synthetic construct
  source 1..22: mol_type = other RNA
tagcccccaaccccctagccac

SEQ ID NO: 23245 - RNA, 22 nt, synthetic construct
  source 1..22: mol_type = other RNA
tagccctgggcccacggcttcg

SEQ ID NO: 23246 - RNA, 22 nt, synthetic construct
  source 1..22: mol_type = other RNA
tagcgcagggtggccactgaga

SEQ ID NO: 23247 - RNA, 22 nt, synthetic construct
  source 1..22: mol_type = other RNA
tagctccctcccgcctcctcca

SEQ ID NO: 23248 - RNA, 22 nt, synthetic construct
  source 1..22: mol_type = other RNA
tagcttcactccttcctcagct

SEQ ID NO: 23249 - RNA, 22 nt, synthetic construct
  source 1..22: mol_type = other RNA
taggaaaacagggatggttggt

SEQ ID NO: 23250 - RNA, 22 nt, synthetic construct
  source 1..22: mol_type = other RNA
taggacagtggggaaaatgacc

SEQ ID NO: 23251 - RNA, 22 nt, synthetic construct
  source 1..22: mol_type = other RNA
taggacgcaccattctcacaaa

SEQ ID NO: 23252 - RNA, 22 nt, synthetic construct
  source 1..22: mol_type = other RNA
taggactgagggtttcagtgct

SEQ ID NO: 23253 - RNA, 22 nt, synthetic construct
  source 1..22: mol_type = other RNA
taggaggggctggagccaggat

SEQ ID NO: 23254 - RNA, 22 nt, synthetic construct
  source 1..22: mol_type = other RNA
taggagtttagcttcactcctt

SEQ ID NO: 23255 - RNA, 22 nt, synthetic construct
  source 1..22: mol_type = other RNA
taggctgtcctgggcaaacagc

SEQ ID NO: 23256 - RNA, 22 nt, synthetic construct
  source 1..22: mol_type = other RNA
tagggaagaggttccagcccct

SEQ ID NO: 23257 - RNA, 22 nt, synthetic construct
  source 1..22: mol_type = other RNA
tagggaagcgggaccctgctct

SEQ ID NO: 23258 - RNA, 22 nt, synthetic construct
  source 1..22: mol_type = other RNA
tagggaaggggcaggagagcca

SEQ ID NO: 23259 - RNA, 22 nt, synthetic construct
  source 1..22: mol_type = other RNA
tagggaggcggggctgggcctg

SEQ ID NO: 23260 - RNA, 22 nt, synthetic construct
  source 1..22: mol_type = other RNA
tagggctgaacagagaagagct

SEQ ID NO: 23261 - RNA, 22 nt, synthetic construct
  source 1..22: mol_type = other RNA
taggggaggggggcaaggagag

SEQ ID NO: 23262 - RNA, 22 nt, synthetic construct
  source 1..22: mol_type = other RNA
tagggggttgggggctagagta

SEQ ID NO: 23263 - RNA, 22 nt, synthetic construct
  source 1..22: mol_type = other RNA
taggggtccaaaacttgggggg

SEQ ID NO: 23264 - RNA, 22 nt, synthetic construct
  source 1..22: mol_type = other RNA
tagggtaccccacgtgggttta

SEQ ID NO: 23265 - RNA, 22 nt, synthetic construct
  source 1..22: mol_type = other RNA
taggtggcctggggcctctggg

SEQ ID NO: 23266 - RNA, 22 nt, synthetic construct
  source 1..22: mol_type = other RNA
taggtgttcaccaggtcgtggc

SEQ ID NO: 23267 - RNA, 22 nt, synthetic construct
  source 1..22: mol_type = other RNA
tagtccccaatttatattgttc

SEQ ID NO: 23268 - RNA, 22 nt, synthetic construct
  source 1..22: mol_type = other RNA
tagtctgagcactggaagcgcc

SEQ ID NO: 23269 - RNA, 22 nt, synthetic construct
  source 1..22: mol_type = other RNA
tagtggctagggggttgggggc

SEQ ID NO: 23270 - RNA, 22 nt, synthetic construct
  source 1..22: mol_type = other RNA
tagttttagcactgaaaccctc

SEQ ID NO: 23271 - RNA, 22 nt, synthetic construct
  source 1..22: mol_type = other RNA
tataaattggggactagaaagg

SEQ ID NO: 23272 - RNA, 22 nt, synthetic construct
  source 1..22: mol_type = other RNA
tatattgttcctccgtgcgtca

SEQ ID NO: 23273 - RNA, 22 nt, synthetic construct
  source 1..22: mol_type = other RNA
tatcaaccacttggtgaggctg

SEQ ID NO: 23274 - RNA, 22 nt, synthetic construct
  source 1..22: mol_type = other RNA
tatcccaggaggcctggagcat

SEQ ID NO: 23275 - RNA, 22 nt, synthetic construct
  source 1..22: mol_type = other RNA
tatcccgtggatctaggagttt

SEQ ID NO: 23276 - RNA, 22 nt, synthetic construct
  source 1..22: mol_type = other RNA
tatcgccatgacaactgggtgg

SEQ ID NO: 23277 - RNA, 22 nt, synthetic construct
  source 1..22: mol_type = other RNA
tatctcacaggtaaaactgacg

SEQ ID NO: 23278 - RNA, 22 nt, synthetic construct
  source 1..22: mol_type = other RNA
tatctgcaaacaggaagtgaac

SEQ ID NO: 23279 - RNA, 22 nt, synthetic construct
  source 1..22: mol_type = other RNA
tatctgctggggtggtttccga

SEQ ID NO: 23280 - RNA, 22 nt, synthetic construct
  source 1..22: mol_type = other RNA
tatctgggacatattcctccgc

SEQ ID NO: 23281 - RNA, 22 nt, synthetic construct
  source 1..22: mol_type = other RNA
tatcttaaacagccagtggcca

SEQ ID NO: 23282 - RNA, 22 nt, synthetic construct
  source 1..22: mol_type = other RNA
tatgcagggtggaggaaggcca

SEQ ID NO: 23283 - RNA, 22 nt, synthetic construct
  source 1..22: mol_type = other RNA
tatgctgtttgcccaggacagc

SEQ ID NO: 23284 - RNA, 22 nt, synthetic construct
  source 1..22: mol_type = other RNA
tatgtcccagatagcactgggg

SEQ ID NO: 23285 - RNA, 22 nt, synthetic construct
  source 1..22: mol_type = other RNA
tattcctccgcccagagcaggg

SEQ ID NO: 23286 - RNA, 22 nt, synthetic construct
  source 1..22: mol_type = other RNA
tattctgattttgtttttccaa

SEQ ID NO: 23287 - RNA, 22 nt, synthetic construct
  source 1..22: mol_type = other RNA
tattgttcctccgtgcgtcagt

SEQ ID NO: 23288 - RNA, 22 nt, synthetic construct
  source 1..22: mol_type = other RNA
tatttccacccagttgtcatgg

SEQ ID NO: 23289 - RNA, 22 nt, synthetic construct
  source 1..22: mol_type = other RNA
tcaaacccagaagcccagagca

SEQ ID NO: 23290 - RNA, 22 nt, synthetic construct
  source 1..22: mol_type = other RNA
tcaaacccaggagcccaggccc

SEQ ID NO: 23291 - RNA, 22 nt, synthetic construct
  source 1..22: mol_type = other RNA
tcaaccacttggtgaggctggt

SEQ ID NO: 23292 - RNA, 22 nt, synthetic construct
  source 1..22: mol_type = other RNA
tcaacccaggaggccaggcccc

SEQ ID NO: 23293 - RNA, 22 nt, synthetic construct
  source 1..22: mol_type = other RNA
tcaagagtcacccagagacagt

SEQ ID NO: 23294 - RNA, 22 nt, synthetic construct
  source 1..22: mol_type = other RNA
tcaagctcggaaaccaccccag

SEQ ID NO: 23295 - RNA, 22 nt, synthetic construct
  source 1..22: mol_type = other RNA
tcaaggacctgcccagtacagg

SEQ ID NO: 23296 - RNA, 22 nt, synthetic construct
  source 1..22: mol_type = other RNA
tcacaaagggagttttccacac

SEQ ID NO: 23297 - RNA, 22 nt, synthetic construct
  source 1..22: mol_type = other RNA
tcacactccagttcactgaggc

SEQ ID NO: 23298 - RNA, 22 nt, synthetic construct
  source 1..22: mol_type = other RNA
tcacagcccgagtttccatgac

SEQ ID NO: 23299 - RNA, 22 nt, synthetic construct
  source 1..22: mol_type = other RNA
tcacagggatgcctgtactggg

SEQ ID NO: 23300 - RNA, 22 nt, synthetic construct
  source 1..22: mol_type = other RNA
tcacaggtaaaactgacgcacg

SEQ ID NO: 23301 - RNA, 22 nt, synthetic construct
  source 1..22: mol_type = other RNA
tcaccaagtggttgataaaccc

SEQ ID NO: 23302 - RNA, 22 nt, synthetic construct
  source 1..22: mol_type = other RNA
tcaccacagccctgccaggacg

SEQ ID NO: 23303 - RNA, 22 nt, synthetic construct
  source 1..22: mol_type = other RNA
tcaccacccacaggtggcgctt

SEQ ID NO: 23304 - RNA, 22 nt, synthetic construct
  source 1..22: mol_type = other RNA
tcaccaggtcgtggccgcctct

SEQ ID NO: 23305 - RNA, 22 nt, synthetic construct
  source 1..22: mol_type = other RNA
tcacccagagacagtgaccaac

SEQ ID NO: 23306 - RNA, 22 nt, synthetic construct
  source 1..22: mol_type = other RNA
tcaccccacacccagacctgac

SEQ ID NO: 23307 - RNA, 22 nt, synthetic construct
  source 1..22: mol_type = other RNA
tcaccccacagttggaggagaa

SEQ ID NO: 23308 - RNA, 22 nt, synthetic construct
  source 1..22: mol_type = other RNA
tcacccctctgggagtcccgcc

SEQ ID NO: 23309 - RNA, 22 nt, synthetic construct
  source 1..22: mol_type = other RNA
tcacctctccaaagctgcccat

SEQ ID NO: 23310 - RNA, 22 nt, synthetic construct
  source 1..22: mol_type = other RNA
tcacctttctagtccccaattt

SEQ ID NO: 23311 - RNA, 22 nt, synthetic construct
  source 1..22: mol_type = other RNA
tcactccttcctcagctccagt

SEQ ID NO: 23312 - RNA, 22 nt, synthetic construct
  source 1..22: mol_type = other RNA
tcactcttcggggtatcccagg

SEQ ID NO: 23313 - RNA, 22 nt, synthetic construct
  source 1..22: mol_type = other RNA
tcactgaggccccctctgcacg

SEQ ID NO: 23314 - RNA, 22 nt, synthetic construct
  source 1..22: mol_type = other RNA
tcactgatcctggtgctgcagc

SEQ ID NO: 23315 - RNA, 22 nt, synthetic construct
  source 1..22: mol_type = other RNA
tcactgtctctgggtgactctt

SEQ ID NO: 23316 - RNA, 22 nt, synthetic construct
  source 1..22: mol_type = other RNA
tcacttcctgtttgcagatagc

SEQ ID NO: 23317 - RNA, 22 nt, synthetic construct
  source 1..22: mol_type = other RNA
tcagaataagttggtcctgagt

SEQ ID NO: 23318 - RNA, 22 nt, synthetic construct
  source 1..22: mol_type = other RNA
tcagacccacgagtccaggccc

SEQ ID NO: 23319 - RNA, 22 nt, synthetic construct
  source 1..22: mol_type = other RNA
tcagacccaggggtccaggccc

SEQ ID NO: 23320 - RNA, 22 nt, synthetic construct
  source 1..22: mol_type = other RNA
tcagactagggaagaggttcca

SEQ ID NO: 23321 - RNA, 22 nt, synthetic construct
  source 1..22: mol_type = other RNA
tcagactgagccccgttcccct

SEQ ID NO: 23322 - RNA, 22 nt, synthetic construct
  source 1..22: mol_type = other RNA
tcagagaggagggattcccttc

SEQ ID NO: 23323 - RNA, 22 nt, synthetic construct
  source 1..22: mol_type = other RNA
tcagagcagctcaggttctggg

SEQ ID NO: 23324 - RNA, 22 nt, synthetic construct
  source 1..22: mol_type = other RNA
tcagagccaggagtcctggccc

SEQ ID NO: 23325 - RNA, 22 nt, synthetic construct
  source 1..22: mol_type = other RNA
tcagatgaaggagtccaggccc

SEQ ID NO: 23326 - RNA, 22 nt, synthetic construct
  source 1..22: mol_type = other RNA
tcagcccctggctgcagggccc

SEQ ID NO: 23327 - RNA, 22 nt, synthetic construct
  source 1..22: mol_type = other RNA
tcagccctaagaatcctggctc

SEQ ID NO: 23328 - RNA, 22 nt, synthetic construct
  source 1..22: mol_type = other RNA
tcagctccagttcaggtcccgg

SEQ ID NO: 23329 - RNA, 22 nt, synthetic construct
  source 1..22: mol_type = other RNA
tcaggaccaacttattctgatt

SEQ ID NO: 23330 - RNA, 22 nt, synthetic construct
  source 1..22: mol_type = other RNA
tcaggcatctttcacagggatg

SEQ ID NO: 23331 - RNA, 22 nt, synthetic construct
  source 1..22: mol_type = other RNA
tcaggccggccaggccttcagt

SEQ ID NO: 23332 - RNA, 22 nt, synthetic construct
  source 1..22: mol_type = other RNA
tcaggcttccctgtcccccttc

SEQ ID NO: 23333 - RNA, 22 nt, synthetic construct
  source 1..22: mol_type = other RNA
tcaggggcctgggcgggactcc

SEQ ID NO: 23334 - RNA, 22 nt, synthetic construct
  source 1..22: mol_type = other RNA
tcaggtcccggagcccacccag

SEQ ID NO: 23335 - RNA, 22 nt, synthetic construct
  source 1..22: mol_type = other RNA
tcaggtctgggtgtggggtgac

SEQ ID NO: 23336 - RNA, 22 nt, synthetic construct
  source 1..22: mol_type = other RNA
tcaggttacgtggccaagaagc

SEQ ID NO: 23337 - RNA, 22 nt, synthetic construct
  source 1..22: mol_type = other RNA
tcaggttctgggagagggtagc

SEQ ID NO: 23338 - RNA, 22 nt, synthetic construct
  source 1..22: mol_type = other RNA
tcagtcctaggaaaacagggat

SEQ ID NO: 23339 - RNA, 22 nt, synthetic construct
  source 1..22: mol_type = other RNA
tcagtctgaagagcagagccag

SEQ ID NO: 23340 - RNA, 22 nt, synthetic construct
  source 1..22: mol_type = other RNA
tcagtgaaacgcaccagacggc

SEQ ID NO: 23341 - RNA, 22 nt, synthetic construct
  source 1..22: mol_type = other RNA
tcagtgaactggagtgtgacag

SEQ ID NO: 23342 - RNA, 22 nt, synthetic construct
  source 1..22: mol_type = other RNA
tcagtgctaaaactaggctgtc

SEQ ID NO: 23343 - RNA, 22 nt, synthetic construct
  source 1..22: mol_type = other RNA
tcagtgctcagtggaaaccacg

SEQ ID NO: 23344 - RNA, 22 nt, synthetic construct
  source 1..22: mol_type = other RNA
tcagtggaaaccacgaaaggac

SEQ ID NO: 23345 - RNA, 22 nt, synthetic construct
  source 1..22: mol_type = other RNA
tcagtggccaccctgcgctacc

SEQ ID NO: 23346 - RNA, 22 nt, synthetic construct
  source 1..22: mol_type = other RNA
tcagttttacctgtgagataag

SEQ ID NO: 23347 - RNA, 22 nt, synthetic construct
  source 1..22: mol_type = other RNA
tcatcccgttcccagggcacgt

SEQ ID NO: 23348 - RNA, 22 nt, synthetic construct
  source 1..22: mol_type = other RNA
tcatctgagggcggaagggctg

SEQ ID NO: 23349 - RNA, 22 nt, synthetic construct
  source 1..22: mol_type = other RNA
tcatctgggtgcgggaacccca

SEQ ID NO: 23350 - RNA, 22 nt, synthetic construct
  source 1..22: mol_type = other RNA
tcatgcccctggctctcctgcc

SEQ ID NO: 23351 - RNA, 22 nt, synthetic construct
  source 1..22: mol_type = other RNA
tcatgctcttggccctcgtagc

SEQ ID NO: 23352 - RNA, 22 nt, synthetic construct
  source 1..22: mol_type = other RNA
tcatggaaactcgggctgtgaa

SEQ ID NO: 23353 - RNA, 22 nt, synthetic construct
  source 1..22: mol_type = other RNA
tcatggcgataggggagggggg

SEQ ID NO: 23354 - RNA, 22 nt, synthetic construct
  source 1..22: mol_type = other RNA
tcattcttcccttaggggtcca

SEQ ID NO: 23355 - RNA, 22 nt, synthetic construct
  source 1..22: mol_type = other RNA
tcattttccccactgtcctagc

SEQ ID NO: 23356 - RNA, 22 nt, synthetic construct
  source 1..22: mol_type = other RNA
tccaaaacttggggggacaaaa

SEQ ID NO: 23357 - RNA, 22 nt, synthetic construct
  source 1..22: mol_type = other RNA
tccaaactgcttctcctcttgg

SEQ ID NO: 23358 - RNA, 22 nt, synthetic construct
  source 1..22: mol_type = other RNA
tccaaagctgcccatctggagg

SEQ ID NO: 23359 - RNA, 22 nt, synthetic construct
  source 1..22: mol_type = other RNA
tccaactgtggggtgactgctt

SEQ ID NO: 23360 - RNA, 22 nt, synthetic construct
  source 1..22: mol_type = other RNA
tccaagggtcaagctcggaaac

SEQ ID NO: 23361 - RNA, 22 nt, synthetic construct
  source 1..22: mol_type = other RNA
tccacaaggcctggggcaagtc

SEQ ID NO: 23362 - RNA, 22 nt, synthetic construct
  source 1..22: mol_type = other RNA
tccacacggacacccccctcct

SEQ ID NO: 23363 - RNA, 22 nt, synthetic construct
  source 1..22: mol_type = other RNA
tccaccatctcatgcccctggc

SEQ ID NO: 23364 - RNA, 22 nt, synthetic construct
  source 1..22: mol_type = other RNA
tccacccaaaaggcagcctggt

SEQ ID NO: 23365 - RNA, 22 nt, synthetic construct
  source 1..22: mol_type = other RNA
tccacccagttgtcatggcgat

SEQ ID NO: 23366 - RNA, 22 nt, synthetic construct
  source 1..22: mol_type = other RNA
tccaccctgcatagccctgggc

SEQ ID NO: 23367 - RNA, 22 nt, synthetic construct
  source 1..22: mol_type = other RNA
tccacctggggctgtgtttctc

SEQ ID NO: 23368 - RNA, 22 nt, synthetic construct
  source 1..22: mol_type = other RNA
tccacgggataaattacccccc

SEQ ID NO: 23369 - RNA, 22 nt, synthetic construct
  source 1..22: mol_type = other RNA
tccactgagcactgaaggcctg

SEQ ID NO: 23370 - RNA, 22 nt, synthetic construct
  source 1..22: mol_type = other RNA
tccagagggagccacgaaaaca

SEQ ID NO: 23371 - RNA, 22 nt, synthetic construct
  source 1..22: mol_type = other RNA
tccagagtccaggcccaacccc

SEQ ID NO: 23372 - RNA, 22 nt, synthetic construct
  source 1..22: mol_type = other RNA
tccagatgggcagctttggaga

SEQ ID NO: 23373 - RNA, 22 nt, synthetic construct
  source 1..22: mol_type = other RNA
tccagcccctcctactctagcc

SEQ ID NO: 23374 - RNA, 22 nt, synthetic construct
  source 1..22: mol_type = other RNA
tccagcccctcctccttcagag

SEQ ID NO: 23375 - RNA, 22 nt, synthetic construct
  source 1..22: mol_type = other RNA
tccaggcaggtccccaagcatc

SEQ ID NO: 23376 - RNA, 22 nt, synthetic construct
  source 1..22: mol_type = other RNA
tccaggccaagtaggtggcctg

SEQ ID NO: 23377 - RNA, 22 nt, synthetic construct
  source 1..22: mol_type = other RNA
tccaggcccaacccctccccat

SEQ ID NO: 23378 - RNA, 22 nt, synthetic construct
  source 1..22: mol_type = other RNA
tccaggcccagccccgcctccc

SEQ ID NO: 23379 - RNA, 22 nt, synthetic construct
  source 1..22: mol_type = other RNA
tccaggccccagcccctcctct

SEQ ID NO: 23380 - RNA, 22 nt, synthetic construct
  source 1..22: mol_type = other RNA
tccaggcccccagcctctcccc

SEQ ID NO: 23381 - RNA, 22 nt, synthetic construct
  source 1..22: mol_type = other RNA
tccaggcccccagtccctccac

SEQ ID NO: 23382 - RNA, 22 nt, synthetic construct
  source 1..22: mol_type = other RNA
tccaggcctcctgggatacccc

SEQ ID NO: 23383 - RNA, 22 nt, synthetic construct
  source 1..22: mol_type = other RNA
tccagggacacggtgctaggac

SEQ ID NO: 23384 - RNA, 22 nt, synthetic construct
  source 1..22: mol_type = other RNA
tccagggggtcggaggagggac

SEQ ID NO: 23385 - RNA, 22 nt, synthetic construct
  source 1..22: mol_type = other RNA
tccagtgctcagactagggaag

SEQ ID NO: 23386 - RNA, 22 nt, synthetic construct
  source 1..22: mol_type = other RNA
tccagttcactgaggccccctc

SEQ ID NO: 23387 - RNA, 22 nt, synthetic construct
  source 1..22: mol_type = other RNA
tccagttcaggtcccggagccc

SEQ ID NO: 23388 - RNA, 22 nt, synthetic construct
  source 1..22: mol_type = other RNA
tccatccttctttccttaaaga

SEQ ID NO: 23389 - RNA, 22 nt, synthetic construct
  source 1..22: mol_type = other RNA
tccatgacctcatgctcttggc

SEQ ID NO: 23390 - RNA, 22 nt, synthetic construct
  source 1..22: mol_type = other RNA
tcccaagaggagaagcagtttg

SEQ ID NO: 23391 - RNA, 22 nt, synthetic construct
  source 1..22: mol_type = other RNA
tcccaagttcttagggtacccc

SEQ ID NO: 23392 - RNA, 22 nt, synthetic construct
  source 1..22: mol_type = other RNA
tcccagaacctgagctgctctg

SEQ ID NO: 23393 - RNA, 22 nt, synthetic construct
  source 1..22: mol_type = other RNA
tcccagaggggtgagacagctg

SEQ ID NO: 23394 - RNA, 22 nt, synthetic construct
  source 1..22: mol_type = other RNA
tcccagatagcactggggactc

SEQ ID NO: 23395 - RNA, 22 nt, synthetic construct
  source 1..22: mol_type = other RNA
tcccagcaagtcgggactccag

SEQ ID NO: 23396 - RNA, 22 nt, synthetic construct
  source 1..22: mol_type = other RNA
tcccagcacagggtggccttcc

SEQ ID NO: 23397 - RNA, 22 nt, synthetic construct
  source 1..22: mol_type = other RNA
tcccaggaggcctggagcattg

SEQ ID NO: 23398 - RNA, 22 nt, synthetic construct
  source 1..22: mol_type = other RNA
tcccagggcacgtgcggcccct

SEQ ID NO: 23399 - RNA, 22 nt, synthetic construct
  source 1..22: mol_type = other RNA
tccccaagcatcgcccccctgc

SEQ ID NO: 23400 - RNA, 22 nt, synthetic construct
  source 1..22: mol_type = other RNA
tccccaatttatattgttcctc

SEQ ID NO: 23401 - RNA, 22 nt, synthetic construct
  source 1..22: mol_type = other RNA
tccccactgtcctagcaccgtg

SEQ ID NO: 23402 - RNA, 22 nt, synthetic construct
  source 1..22: mol_type = other RNA
tccccagtgctatctgggacat

SEQ ID NO: 23403 - RNA, 22 nt, synthetic construct
  source 1..22: mol_type = other RNA
tccccattcaacccaggaggcc

SEQ ID NO: 23404 - RNA, 22 nt, synthetic construct
  source 1..22: mol_type = other RNA
tccccattcagacccaggggtc

SEQ ID NO: 23405 - RNA, 22 nt, synthetic construct
  source 1..22: mol_type = other RNA
tcccccagaggccccaggccac

SEQ ID NO: 23406 - RNA, 22 nt, synthetic construct
  source 1..22: mol_type = other RNA
tccccccaagttttggacccct

SEQ ID NO: 23407 - RNA, 22 nt, synthetic construct
  source 1..22: mol_type = other RNA
tcccccttcccctgcatccccc

SEQ ID NO: 23408 - RNA, 22 nt, synthetic construct
  source 1..22: mol_type = other RNA
tcccccttcctcgtccaccatc

SEQ ID NO: 23409 - RNA, 22 nt, synthetic construct
  source 1..22: mol_type = other RNA
tccccgttcacttcctgtttgc

SEQ ID NO: 23410 - RNA, 22 nt, synthetic construct
  source 1..22: mol_type = other RNA
tccccgttcccctgcatccccc

SEQ ID NO: 23411 - RNA, 22 nt, synthetic construct
  source 1..22: mol_type = other RNA
tcccctatcgccatgacaactg

SEQ ID NO: 23412 - RNA, 22 nt, synthetic construct
  source 1..22: mol_type = other RNA
tcccctgcatcccccagaggcc

SEQ ID NO: 23413 - RNA, 22 nt, synthetic construct
  source 1..22: mol_type = other RNA
tcccctgcatcccccttcccct

SEQ ID NO: 23414 - RNA, 22 nt, synthetic construct
  source 1..22: mol_type = other RNA
tcccctgcatccccgttcccct

SEQ ID NO: 23415 - RNA, 22 nt, synthetic construct
  source 1..22: mol_type = other RNA
tcccctgcttcttggccacgta

SEQ ID NO: 23416 - RNA, 22 nt, synthetic construct
  source 1..22: mol_type = other RNA
tcccgcacccagatgagaagcc

SEQ ID NO: 23417 - RNA, 22 nt, synthetic construct
  source 1..22: mol_type = other RNA
tcccgcccaggcccctgagtct

SEQ ID NO: 23418 - RNA, 22 nt, synthetic construct
  source 1..22: mol_type = other RNA
tcccgcctcctccagatgggca

SEQ ID NO: 23419 - RNA, 22 nt, synthetic construct
  source 1..22: mol_type = other RNA
tcccgcttccctaaggccctgc

SEQ ID NO: 23420 - RNA, 22 nt, synthetic construct
  source 1..22: mol_type = other RNA
tcccggagcccacccagtgtcc

SEQ ID NO: 23421 - RNA, 22 nt, synthetic construct
  source 1..22: mol_type = other RNA
tcccggccagtttctccacctg

SEQ ID NO: 23422 - RNA, 22 nt, synthetic construct
  source 1..22: mol_type = other RNA
tcccgtggatctaggagtttag

SEQ ID NO: 23423 - RNA, 22 nt, synthetic construct
  source 1..22: mol_type = other RNA
tcccgttcccagggcacgtgcg

SEQ ID NO: 23424 - RNA, 22 nt, synthetic construct
  source 1..22: mol_type = other RNA
tccctaagacccagaagtccag

SEQ ID NO: 23425 - RNA, 22 nt, synthetic construct
  source 1..22: mol_type = other RNA
tccctaaggccctgctctgggc

SEQ ID NO: 23426 - RNA, 22 nt, synthetic construct
  source 1..22: mol_type = other RNA
tccctacaggggttcctggctc

SEQ ID NO: 23427 - RNA, 22 nt, synthetic construct
  source 1..22: mol_type = other RNA
tccctagtctgagcactggaag

SEQ ID NO: 23428 - RNA, 22 nt, synthetic construct
  source 1..22: mol_type = other RNA
tccctcacctctccaaagctgc

SEQ ID NO: 23429 - RNA, 22 nt, synthetic construct
  source 1..22: mol_type = other RNA
tccctcagacccacgagtccag

SEQ ID NO: 23430 - RNA, 22 nt, synthetic construct
  source 1..22: mol_type = other RNA
tccctccaccctcagacccagg

SEQ ID NO: 23431 - RNA, 22 nt, synthetic construct
  source 1..22: mol_type = other RNA
tccctcccgcctcctccagatg

SEQ ID NO: 23432 - RNA, 22 nt, synthetic construct
  source 1..22: mol_type = other RNA
tccctcctccgaccccctggac

SEQ ID NO: 23433 - RNA, 22 nt, synthetic construct
  source 1..22: mol_type = other RNA
tccctcctctctgaaccccagc

SEQ ID NO: 23434 - RNA, 22 nt, synthetic construct
  source 1..22: mol_type = other RNA
tccctcggacccaggagtccag

SEQ ID NO: 23435 - RNA, 22 nt, synthetic construct
  source 1..22: mol_type = other RNA
tccctctggagtcccgacttgc

SEQ ID NO: 23436 - RNA, 22 nt, synthetic construct
  source 1..22: mol_type = other RNA
tccctggatctgttttcgtggc

SEQ ID NO: 23437 - RNA, 22 nt, synthetic construct
  source 1..22: mol_type = other RNA
tccctggtgcccaggcctcagg

SEQ ID NO: 23438 - RNA, 22 nt, synthetic construct
  source 1..22: mol_type = other RNA
tccctgtcccccttcctcgtcc

SEQ ID NO: 23439 - RNA, 22 nt, synthetic construct
  source 1..22: mol_type = other RNA
tccctgtgaaagatgcctgagg

SEQ ID NO: 23440 - RNA, 22 nt, synthetic construct
  source 1..22: mol_type = other RNA
tccctgttttcctaggactgag

SEQ ID NO: 23441 - RNA, 22 nt, synthetic construct
  source 1..22: mol_type = other RNA
tcccttaggggtccaaaacttg

SEQ ID NO: 23442 - RNA, 22 nt, synthetic construct
  source 1..22: mol_type = other RNA
tcccttccccgttcacttcctg

SEQ ID NO: 23443 - RNA, 22 nt, synthetic construct
  source 1..22: mol_type = other RNA
tcccttctcaggttacgtggcc

SEQ ID NO: 23444 - RNA, 22 nt, synthetic construct
  source 1..22: mol_type = other RNA
tccctttcaaggacctgcccag

SEQ ID NO: 23445 - RNA, 22 nt, synthetic construct
  source 1..22: mol_type = other RNA
tccctttctctttctccatcct

SEQ ID NO: 23446 - RNA, 22 nt, synthetic construct
  source 1..22: mol_type = other RNA
tccctttgtgagaatggtgcgt

SEQ ID NO: 23447 - RNA, 22 nt, synthetic construct
  source 1..22: mol_type = other RNA
tccgaccccctggacttcggct

SEQ ID NO: 23448 - RNA, 22 nt, synthetic construct
  source 1..22: mol_type = other RNA
tccgagcttgacccttggaagg

SEQ ID NO: 23449 - RNA, 22 nt, synthetic construct
  source 1..22: mol_type = other RNA
tccgcccagagcagggtcccgc

SEQ ID NO: 23450 - RNA, 22 nt, synthetic construct
  source 1..22: mol_type = other RNA
tccgccctcagatgaaggagtc

SEQ ID NO: 23451 - RNA, 22 nt, synthetic construct
  source 1..22: mol_type = other RNA
tccgggacctgaactggagctg

SEQ ID NO: 23452 - RNA, 22 nt, synthetic construct
  source 1..22: mol_type = other RNA
tccgtgcgtcagttttacctgt

SEQ ID NO: 23453 - RNA, 22 nt, synthetic construct
  source 1..22: mol_type = other RNA
tccgtgtggaaaactccctttg

SEQ ID NO: 23454 - RNA, 22 nt, synthetic construct
  source 1..22: mol_type = other RNA
tcctactctagcccccaacccc

SEQ ID NO: 23455 - RNA, 22 nt, synthetic construct
  source 1..22: mol_type = other RNA
tcctagatccacgggataaatt

SEQ ID NO: 23456 - RNA, 22 nt, synthetic construct
  source 1..22: mol_type = other RNA
tcctagcaccgtgtccctggat

SEQ ID NO: 23457 - RNA, 22 nt, synthetic construct
  source 1..22: mol_type = other RNA
tcctaggaaaacagggatggtt

SEQ ID NO: 23458 - RNA, 22 nt, synthetic construct
  source 1..22: mol_type = other RNA
tcctaggactgagggtttcagt

SEQ ID NO: 23459 - RNA, 22 nt, synthetic construct
  source 1..22: mol_type = other RNA
tcctaggtgttcaccaggtcgt

SEQ ID NO: 23460 - RNA, 22 nt, synthetic construct
  source 1..22: mol_type = other RNA
tcctcaccacagccctgccagg

SEQ ID NO: 23461 - RNA, 22 nt, synthetic construct
  source 1..22: mol_type = other RNA
tcctcagctccagttcaggtcc

SEQ ID NO: 23462 - RNA, 22 nt, synthetic construct
  source 1..22: mol_type = other RNA
tcctccaactgtggggtgactg

SEQ ID NO: 23463 - RNA, 22 nt, synthetic construct
  source 1..22: mol_type = other RNA
tcctccaccctgcatagccctg

SEQ ID NO: 23464 - RNA, 22 nt, synthetic construct
  source 1..22: mol_type = other RNA
tcctccagatgggcagctttgg

SEQ ID NO: 23465 - RNA, 22 nt, synthetic construct
  source 1..22: mol_type = other RNA
tcctccgaccccctggacttcg

SEQ ID NO: 23466 - RNA, 22 nt, synthetic construct
  source 1..22: mol_type = other RNA
tcctccgcccagagcagggtcc

SEQ ID NO: 23467 - RNA, 22 nt, synthetic construct
  source 1..22: mol_type = other RNA
tcctccgtgcgtcagttttacc

SEQ ID NO: 23468 - RNA, 22 nt, synthetic construct
  source 1..22: mol_type = other RNA
tcctccttcagagccaggagtc

SEQ ID NO: 23469 - RNA, 22 nt, synthetic construct
  source 1..22: mol_type = other RNA
tcctcgtccaccatctcatgcc

SEQ ID NO: 23470 - RNA, 22 nt, synthetic construct
  source 1..22: mol_type = other RNA
tcctctctcaaacccaggagcc

SEQ ID NO: 23471 - RNA, 22 nt, synthetic construct
  source 1..22: mol_type = other RNA
tcctctctgaaccccagcccac

SEQ ID NO: 23472 - RNA, 22 nt, synthetic construct
  source 1..22: mol_type = other RNA
tcctcttgggaagtgtaaggaa

SEQ ID NO: 23473 - RNA, 22 nt, synthetic construct
  source 1..22: mol_type = other RNA
tcctgagttctaactttggctc

SEQ ID NO: 23474 - RNA, 22 nt, synthetic construct
  source 1..22: mol_type = other RNA
tcctgcaccccaattgccttag

SEQ ID NO: 23475 - RNA, 22 nt, synthetic construct
  source 1..22: mol_type = other RNA
tcctgcagagtatctgctgggg

SEQ ID NO: 23476 - RNA, 22 nt, synthetic construct
  source 1..22: mol_type = other RNA
tcctgcatccttctccaggcag

SEQ ID NO: 23477 - RNA, 22 nt, synthetic construct
  source 1..22: mol_type = other RNA
tcctgccccttccctacagggg

SEQ ID NO: 23478 - RNA, 22 nt, synthetic construct
  source 1..22: mol_type = other RNA
tcctgccttaaacccagccagg

SEQ ID NO: 23479 - RNA, 22 nt, synthetic construct
  source 1..22: mol_type = other RNA
tcctggcagggctgtggtgagg

SEQ ID NO: 23480 - RNA, 22 nt, synthetic construct
  source 1..22: mol_type = other RNA
tcctggcccccagcccctcctg

SEQ ID NO: 23481 - RNA, 22 nt, synthetic construct
  source 1..22: mol_type = other RNA
tcctggctatctgcaaacagga

SEQ ID NO: 23482 - RNA, 22 nt, synthetic construct
  source 1..22: mol_type = other RNA
tcctggctccagcccctcctac

SEQ ID NO: 23483 - RNA, 22 nt, synthetic construct
  source 1..22: mol_type = other RNA
tcctggctctgaaggaggaggg

SEQ ID NO: 23484 - RNA, 22 nt, synthetic construct
  source 1..22: mol_type = other RNA
tcctggctctgctcttcagact

SEQ ID NO: 23485 - RNA, 22 nt, synthetic construct
  source 1..22: mol_type = other RNA
tcctgggataccccgaagagtg

SEQ ID NO: 23486 - RNA, 22 nt, synthetic construct
  source 1..22: mol_type = other RNA
tcctgggcaaacagcataagct

SEQ ID NO: 23487 - RNA, 22 nt, synthetic construct
  source 1..22: mol_type = other RNA
tcctgggcttgccaaggactca

SEQ ID NO: 23488 - RNA, 22 nt, synthetic construct
  source 1..22: mol_type = other RNA
tcctgggtctgagggtggaggg

SEQ ID NO: 23489 - RNA, 22 nt, synthetic construct
  source 1..22: mol_type = other RNA
tcctgggttgaatggggagggg

SEQ ID NO: 23490 - RNA, 22 nt, synthetic construct
  source 1..22: mol_type = other RNA
tcctgggtttgagagaggaggg

SEQ ID NO: 23491 - RNA, 22 nt, synthetic construct
  source 1..22: mol_type = other RNA
tcctggtgctgcagcttcctta

SEQ ID NO: 23492 - RNA, 22 nt, synthetic construct
  source 1..22: mol_type = other RNA
tcctgtttgcagatagccagga

SEQ ID NO: 23493 - RNA, 22 nt, synthetic construct
  source 1..22: mol_type = other RNA
tccttaaagagtccccagtgct

SEQ ID NO: 23494 - RNA, 22 nt, synthetic construct
  source 1..22: mol_type = other RNA
tccttacacttcccaagaggag

SEQ ID NO: 23495 - RNA, 22 nt, synthetic construct
  source 1..22: mol_type = other RNA
tccttcagagccaggagtcctg

SEQ ID NO: 23496 - RNA, 22 nt, synthetic construct
  source 1..22: mol_type = other RNA
tccttcatctgagggcggaagg

SEQ ID NO: 23497 - RNA, 22 nt, synthetic construct
  source 1..22: mol_type = other RNA
tccttccaagggtcaagctcgg

SEQ ID NO: 23498 - RNA, 22 nt, synthetic construct
  source 1..22: mol_type = other RNA
tccttcctcagctccagttcag

SEQ ID NO: 23499 - RNA, 22 nt, synthetic construct
  source 1..22: mol_type = other RNA
tccttctccaggcaggtcccca

SEQ ID NO: 23500 - RNA, 22 nt, synthetic construct
  source 1..22: mol_type = other RNA
tccttctttccttaaagagtcc

SEQ ID NO: 23501 - RNA, 22 nt, synthetic construct
  source 1..22: mol_type = other RNA
tccttgaaagggaaaggcccat

SEQ ID NO: 23502 - RNA, 22 nt, synthetic construct
  source 1..22: mol_type = other RNA
tccttgcccccctcccctatcg

SEQ ID NO: 23503 - RNA, 22 nt, synthetic construct
  source 1..22: mol_type = other RNA
tccttggcaagcccaggagagg

SEQ ID NO: 23504 - RNA, 22 nt, synthetic construct
  source 1..22: mol_type = other RNA
tcctttcgtggtttccactgag

SEQ ID NO: 23505 - RNA, 22 nt, synthetic construct
  source 1..22: mol_type = other RNA
tcgccatgacaactgggtggaa

SEQ ID NO: 23506 - RNA, 22 nt, synthetic construct
  source 1..22: mol_type = other RNA
tcgcccccctgctgtggctgtt

SEQ ID NO: 23507 - RNA, 22 nt, synthetic construct
  source 1..22: mol_type = other RNA
tcggaaaccaccccagcagata

SEQ ID NO: 23508 - RNA, 22 nt, synthetic construct
  source 1..22: mol_type = other RNA
tcggacccaggagtccaggccc

SEQ ID NO: 23509 - RNA, 22 nt, synthetic construct
  source 1..22: mol_type = other RNA
tcggaggagggacttgccccag

SEQ ID NO: 23510 - RNA, 22 nt, synthetic construct
  source 1..22: mol_type = other RNA
tcggctcgtttatttccaccca

SEQ ID NO: 23511 - RNA, 22 nt, synthetic construct
  source 1..22: mol_type = other RNA
tcggcttttgtccccccaagtt

SEQ ID NO: 23512 - RNA, 22 nt, synthetic construct
  source 1..22: mol_type = other RNA
tcgggactccagagggagccac

SEQ ID NO: 23513 - RNA, 22 nt, synthetic construct
  source 1..22: mol_type = other RNA
tcgggctgtgaaggggccgcac

SEQ ID NO: 23514 - RNA, 22 nt, synthetic construct
  source 1..22: mol_type = other RNA
tcggggtatcccaggaggcctg

SEQ ID NO: 23515 - RNA, 22 nt, synthetic construct
  source 1..22: mol_type = other RNA
tcgtagctccctcccgcctcct

SEQ ID NO: 23516 - RNA, 22 nt, synthetic construct
  source 1..22: mol_type = other RNA
tcgtccaccatctcatgcccct

SEQ ID NO: 23517 - RNA, 22 nt, synthetic construct
  source 1..22: mol_type = other RNA
tcgtcctgcatccttctccagg

SEQ ID NO: 23518 - RNA, 22 nt, synthetic construct
  source 1..22: mol_type = other RNA
tcgtggccgcctctactccctt

SEQ ID NO: 23519 - RNA, 22 nt, synthetic construct
  source 1..22: mol_type = other RNA
tcgtggctccctctggagtccc

SEQ ID NO: 23520 - RNA, 22 nt, synthetic construct
  source 1..22: mol_type = other RNA
tcgtggggtccaggccaagtag

SEQ ID NO: 23521 - RNA, 22 nt, synthetic construct
  source 1..22: mol_type = other RNA
tcgtgggtctgagggaggaggg

SEQ ID NO: 23522 - RNA, 22 nt, synthetic construct
  source 1..22: mol_type = other RNA
tcgtggtttccactgagcactg

SEQ ID NO: 23523 - RNA, 22 nt, synthetic construct
  source 1..22: mol_type = other RNA
tcgttcctgcagagtatctgct

SEQ ID NO: 23524 - RNA, 22 nt, synthetic construct
  source 1..22: mol_type = other RNA
tcgtttatttccacccagttgt

SEQ ID NO: 23525 - RNA, 22 nt, synthetic construct
  source 1..22: mol_type = other RNA
tctaacaggtaccatgtggggt

SEQ ID NO: 23526 - RNA, 22 nt, synthetic construct
  source 1..22: mol_type = other RNA
tctaactttggctcttcacctt

SEQ ID NO: 23527 - RNA, 22 nt, synthetic construct
  source 1..22: mol_type = other RNA
tctaccaggctgccttttgggt

SEQ ID NO: 23528 - RNA, 22 nt, synthetic construct
  source 1..22: mol_type = other RNA
tctactccctttctctttctcc

SEQ ID NO: 23529 - RNA, 22 nt, synthetic construct
  source 1..22: mol_type = other RNA
tctagcccccaaccccctagcc

SEQ ID NO: 23530 - RNA, 22 nt, synthetic construct
  source 1..22: mol_type = other RNA
tctaggagtttagcttcactcc

SEQ ID NO: 23531 - RNA, 22 nt, synthetic construct
  source 1..22: mol_type = other RNA
tctagtccccaatttatattgt

SEQ ID NO: 23532 - RNA, 22 nt, synthetic construct
  source 1..22: mol_type = other RNA
tctcaaacccaggagcccaggc

SEQ ID NO: 23533 - RNA, 22 nt, synthetic construct
  source 1..22: mol_type = other RNA
tctcacaaagggagttttccac

SEQ ID NO: 23534 - RNA, 22 nt, synthetic construct
  source 1..22: mol_type = other RNA
tctcacaggtaaaactgacgca

SEQ ID NO: 23535 - RNA, 22 nt, synthetic construct
  source 1..22: mol_type = other RNA
tctcacccctctgggagtcccg

SEQ ID NO: 23536 - RNA, 22 nt, synthetic construct
  source 1..22: mol_type = other RNA
tctcaggttacgtggccaagaa

SEQ ID NO: 23537 - RNA, 22 nt, synthetic construct
  source 1..22: mol_type = other RNA
tctcagtggccaccctgcgcta

SEQ ID NO: 23538 - RNA, 22 nt, synthetic construct
  source 1..22: mol_type = other RNA
tctcatctgggtgcgggaaccc

SEQ ID NO: 23539 - RNA, 22 nt, synthetic construct
  source 1..22: mol_type = other RNA
tctcatgcccctggctctcctg

SEQ ID NO: 23540 - RNA, 22 nt, synthetic construct
  source 1..22: mol_type = other RNA
tctcattcttcccttaggggtc

SEQ ID NO: 23541 - RNA, 22 nt, synthetic construct
  source 1..22: mol_type = other RNA
tctccaaagctgcccatctgga

SEQ ID NO: 23542 - RNA, 22 nt, synthetic construct
  source 1..22: mol_type = other RNA
tctccacctggggctgtgtttc

SEQ ID NO: 23543 - RNA, 22 nt, synthetic construct
  source 1..22: mol_type = other RNA
tctccaggcaggtccccaagca

SEQ ID NO: 23544 - RNA, 22 nt, synthetic construct
  source 1..22: mol_type = other RNA
tctccatccttctttccttaaa

SEQ ID NO: 23545 - RNA, 22 nt, synthetic construct
  source 1..22: mol_type = other RNA
tctcccagaacctgagctgctc

SEQ ID NO: 23546 - RNA, 22 nt, synthetic construct
  source 1..22: mol_type = other RNA
tctccccattcagacccagggg

SEQ ID NO: 23547 - RNA, 22 nt, synthetic construct
  source 1..22: mol_type = other RNA
tctcctccaactgtggggtgac

SEQ ID NO: 23548 - RNA, 22 nt, synthetic construct
  source 1..22: mol_type = other RNA
tctcctcttgggaagtgtaagg

SEQ ID NO: 23549 - RNA, 22 nt, synthetic construct
  source 1..22: mol_type = other RNA
tctcctgccccttccctacagg

SEQ ID NO: 23550 - RNA, 22 nt, synthetic construct
  source 1..22: mol_type = other RNA
tctcctgggcttgccaaggact

SEQ ID NO: 23551 - RNA, 22 nt, synthetic construct
  source 1..22: mol_type = other RNA
tctccttgcccccctcccctat

SEQ ID NO: 23552 - RNA, 22 nt, synthetic construct
  source 1..22: mol_type = other RNA
tctcgtcctgcatccttctcca

SEQ ID NO: 23553 - RNA, 22 nt, synthetic construct
  source 1..22: mol_type = other RNA
tctcgtggggtccaggccaagt

SEQ ID NO: 23554 - RNA, 22 nt, synthetic construct
  source 1..22: mol_type = other RNA
tctctcaaacccaggagcccag

SEQ ID NO: 23555 - RNA, 22 nt, synthetic construct
  source 1..22: mol_type = other RNA
tctctgaaccccagcccacccc

SEQ ID NO: 23556 - RNA, 22 nt, synthetic construct
  source 1..22: mol_type = other RNA
tctctgggtgactcttgattcc

SEQ ID NO: 23557 - RNA, 22 nt, synthetic construct
  source 1..22: mol_type = other RNA
tctctgttcagccctaagaatc

SEQ ID NO: 23558 - RNA, 22 nt, synthetic construct
  source 1..22: mol_type = other RNA
tctctttctccatccttctttc

SEQ ID NO: 23559 - RNA, 22 nt, synthetic construct
  source 1..22: mol_type = other RNA
tctgaaccccagcccaccccaa

SEQ ID NO: 23560 - RNA, 22 nt, synthetic construct
  source 1..22: mol_type = other RNA
tctgaagagcagagccaggaac

SEQ ID NO: 23561 - RNA, 22 nt, synthetic construct
  source 1..22: mol_type = other RNA
tctgaaggaggaggggctggaa

SEQ ID NO: 23562 - RNA, 22 nt, synthetic construct
  source 1..22: mol_type = other RNA
tctgaatggggagaggctgggg

SEQ ID NO: 23563 - RNA, 22 nt, synthetic construct
  source 1..22: mol_type = other RNA
tctgacgcggccgtctggtgcg

SEQ ID NO: 23564 - RNA, 22 nt, synthetic construct
  source 1..22: mol_type = other RNA
tctgagcactggaagcgccacc

SEQ ID NO: 23565 - RNA, 22 nt, synthetic construct
  source 1..22: mol_type = other RNA
tctgagggcggaagggctgggg

SEQ ID NO: 23566 - RNA, 22 nt, synthetic construct
  source 1..22: mol_type = other RNA
tctgagggtggagggactgggg

SEQ ID NO: 23567 - RNA, 22 nt, synthetic construct
  source 1..22: mol_type = other RNA
tctgattttgtttttccaaact

SEQ ID NO: 23568 - RNA, 22 nt, synthetic construct
  source 1..22: mol_type = other RNA
tctgcaaacaggaagtgaacgg

SEQ ID NO: 23569 - RNA, 22 nt, synthetic construct
  source 1..22: mol_type = other RNA
tctgcacggggccctgcagcca

SEQ ID NO: 23570 - RNA, 22 nt, synthetic construct
  source 1..22: mol_type = other RNA
tctgcaggaacgaagccgtggg

SEQ ID NO: 23571 - RNA, 22 nt, synthetic construct
  source 1..22: mol_type = other RNA
tctgctcttcagactgagcccc

SEQ ID NO: 23572 - RNA, 22 nt, synthetic construct
  source 1..22: mol_type = other RNA
tctgctggggtggtttccgagc

SEQ ID NO: 23573 - RNA, 22 nt, synthetic construct
  source 1..22: mol_type = other RNA
tctggaggaggcgggagggagc

SEQ ID NO: 23574 - RNA, 22 nt, synthetic construct
  source 1..22: mol_type = other RNA
tctggagtcccgacttgctggg

SEQ ID NO: 23575 - RNA, 22 nt, synthetic construct
  source 1..22: mol_type = other RNA
tctggagtccctggtgcccagg

SEQ ID NO: 23576 - RNA, 22 nt, synthetic construct
  source 1..22: mol_type = other RNA
tctggccactggctgtttaaga

SEQ ID NO: 23577 - RNA, 22 nt, synthetic construct
  source 1..22: mol_type = other RNA
tctgggacatattcctccgccc

SEQ ID NO: 23578 - RNA, 22 nt, synthetic construct
  source 1..22: mol_type = other RNA
tctgggagagggtagcgcaggg

SEQ ID NO: 23579 - RNA, 22 nt, synthetic construct
  source 1..22: mol_type = other RNA
tctgggagtcccgcccaggccc

SEQ ID NO: 23580 - RNA, 22 nt, synthetic construct
  source 1..22: mol_type = other RNA
tctgggcggaggaatatgtccc

SEQ ID NO: 23581 - RNA, 22 nt, synthetic construct
  source 1..22: mol_type = other RNA
tctgggcttctgggtttgagtc

SEQ ID NO: 23582 - RNA, 22 nt, synthetic construct
  source 1..22: mol_type = other RNA
tctgggggatgcaggggaaggg

SEQ ID NO: 23583 - RNA, 22 nt, synthetic construct
  source 1..22: mol_type = other RNA
tctgggtcttagggaggcgggg

SEQ ID NO: 23584 - RNA, 22 nt, synthetic construct
  source 1..22: mol_type = other RNA
tctgggtgactcttgattcccg

SEQ ID NO: 23585 - RNA, 22 nt, synthetic construct
  source 1..22: mol_type = other RNA
tctgggtgcgggaaccccacat

SEQ ID NO: 23586 - RNA, 22 nt, synthetic construct
  source 1..22: mol_type = other RNA
tctgggtgtggggtgaccagct

SEQ ID NO: 23587 - RNA, 22 nt, synthetic construct
  source 1..22: mol_type = other RNA
tctgggtttgagtccttggcaa

SEQ ID NO: 23588 - RNA, 22 nt, synthetic construct
  source 1..22: mol_type = other RNA
tctggtgcgtttcactgatcct

SEQ ID NO: 23589 - RNA, 22 nt, synthetic construct
  source 1..22: mol_type = other RNA
tctgtcccagcacagggtggcc

SEQ ID NO: 23590 - RNA, 22 nt, synthetic construct
  source 1..22: mol_type = other RNA
tctgttcagccctaagaatcct

SEQ ID NO: 23591 - RNA, 22 nt, synthetic construct
  source 1..22: mol_type = other RNA
tctgttttcgtggctccctctg

SEQ ID NO: 23592 - RNA, 22 nt, synthetic construct
  source 1..22: mol_type = other RNA
tcttaaacagccagtggccaga

SEQ ID NO: 23593 - RNA, 22 nt, synthetic construct
  source 1..22: mol_type = other RNA
tcttagggaggcggggctgggc

SEQ ID NO: 23594 - RNA, 22 nt, synthetic construct
  source 1..22: mol_type = other RNA
tcttagggctgaacagagaaga

SEQ ID NO: 23595 - RNA, 22 nt, synthetic construct
  source 1..22: mol_type = other RNA
tcttagggtaccccacgtgggt

SEQ ID NO: 23596 - RNA, 22 nt, synthetic construct
  source 1..22: mol_type = other RNA
tcttcacctttctagtccccaa

SEQ ID NO: 23597 - RNA, 22 nt, synthetic construct
  source 1..22: mol_type = other RNA
tcttcagactgagccccgttcc

SEQ ID NO: 23598 - RNA, 22 nt, synthetic construct
  source 1..22: mol_type = other RNA
tcttccctagtctgagcactgg

SEQ ID NO: 23599 - RNA, 22 nt, synthetic construct
  source 1..22: mol_type = other RNA
tcttcccttaggggtccaaaac

SEQ ID NO: 23600 - RNA, 22 nt, synthetic construct
  source 1..22: mol_type = other RNA
tcttcggggtatcccaggaggc

SEQ ID NO: 23601 - RNA, 22 nt, synthetic construct
  source 1..22: mol_type = other RNA
tcttctctgttcagccctaaga

SEQ ID NO: 23602 - RNA, 22 nt, synthetic construct
  source 1..22: mol_type = other RNA
tcttgattcccggccagtttct

SEQ ID NO: 23603 - RNA, 22 nt, synthetic construct
  source 1..22: mol_type = other RNA
tcttggccacgtaacctgagaa

SEQ ID NO: 23604 - RNA, 22 nt, synthetic construct
  source 1..22: mol_type = other RNA
tcttggccctcgtagctccctc

SEQ ID NO: 23605 - RNA, 22 nt, synthetic construct
  source 1..22: mol_type = other RNA
tcttgggaagtgtaaggaagct

SEQ ID NO: 23606 - RNA, 22 nt, synthetic construct
  source 1..22: mol_type = other RNA
tctttaaggaaagaaggatgga

SEQ ID NO: 23607 - RNA, 22 nt, synthetic construct
  source 1..22: mol_type = other RNA
tctttcacagggatgcctgtac

SEQ ID NO: 23608 - RNA, 22 nt, synthetic construct
  source 1..22: mol_type = other RNA
tctttccttaaagagtccccag

SEQ ID NO: 23609 - RNA, 22 nt, synthetic construct
  source 1..22: mol_type = other RNA
tctttctccatccttctttcct

SEQ ID NO: 23610 - RNA, 22 nt, synthetic construct
  source 1..22: mol_type = other RNA
tgaaaccctcagtcctaggaaa

SEQ ID NO: 23611 - RNA, 22 nt, synthetic construct
  source 1..22: mol_type = other RNA
tgaaacgcaccagacggccgcg

SEQ ID NO: 23612 - RNA, 22 nt, synthetic construct
  source 1..22: mol_type = other RNA
tgaaagatgcctgaggcctggg

SEQ ID NO: 23613 - RNA, 22 nt, synthetic construct
  source 1..22: mol_type = other RNA
tgaaagggaaaggcccattgct

SEQ ID NO: 23614 - RNA, 22 nt, synthetic construct
  source 1..22: mol_type = other RNA
tgaacacctaggacgcaccatt

SEQ ID NO: 23615 - RNA, 22 nt, synthetic construct
  source 1..22: mol_type = other RNA
tgaacagagaagagctgggggc

SEQ ID NO: 23616 - RNA, 22 nt, synthetic construct
  source 1..22: mol_type = other RNA
tgaaccccagcccaccccaatg

SEQ ID NO: 23617 - RNA, 22 nt, synthetic construct
  source 1..22: mol_type = other RNA
tgaacggggaagggagggggct

SEQ ID NO: 23618 - RNA, 22 nt, synthetic construct
  source 1..22: mol_type = other RNA
tgaactcggctcgtttatttcc

SEQ ID NO: 23619 - RNA, 22 nt, synthetic construct
  source 1..22: mol_type = other RNA
tgaactggagctgaggaaggag

SEQ ID NO: 23620 - RNA, 22 nt, synthetic construct
  source 1..22: mol_type = other RNA
tgaactggagtgtgacagcctg

SEQ ID NO: 23621 - RNA, 22 nt, synthetic construct
  source 1..22: mol_type = other RNA
tgaagagcagagccaggaaccc

SEQ ID NO: 23622 - RNA, 22 nt, synthetic construct
  source 1..22: mol_type = other RNA
tgaagagccaaagttagaactc

SEQ ID NO: 23623 - RNA, 22 nt, synthetic construct
  source 1..22: mol_type = other RNA
tgaagctaaactcctagatcca

SEQ ID NO: 23624 - RNA, 22 nt, synthetic construct
  source 1..22: mol_type = other RNA
tgaaggaggaggggctggaacc

SEQ ID NO: 23625 - RNA, 22 nt, synthetic construct
  source 1..22: mol_type = other RNA
tgaaggagtccaggcccccagc

SEQ ID NO: 23626 - RNA, 22 nt, synthetic construct
  source 1..22: mol_type = other RNA
tgaaggcctggccggcctgacc

SEQ ID NO: 23627 - RNA, 22 nt, synthetic construct
  source 1..22: mol_type = other RNA
tgaaggggccgcacgtgccctg

SEQ ID NO: 23628 - RNA, 22 nt, synthetic construct
  source 1..22: mol_type = other RNA
tgaatggggagaggctgggggc

SEQ ID NO: 23629 - RNA, 22 nt, synthetic construct
  source 1..22: mol_type = other RNA
tgaatggggaggggttgggcct

SEQ ID NO: 23630 - RNA, 22 nt, synthetic construct
  source 1..22: mol_type = other RNA
tgacaactgggtggaaataaac

SEQ ID NO: 23631 - RNA, 22 nt, synthetic construct
  source 1..22: mol_type = other RNA
tgacacgggccaccgtttctca

SEQ ID NO: 23632 - RNA, 22 nt, synthetic construct
  source 1..22: mol_type = other RNA
tgacagcctggggcccaggcac

SEQ ID NO: 23633 - RNA, 22 nt, synthetic construct
  source 1..22: mol_type = other RNA
tgaccaaccatccctgttttcc

SEQ ID NO: 23634 - RNA, 22 nt, synthetic construct
  source 1..22: mol_type = other RNA
tgaccactgggcaaccaggcgt

SEQ ID NO: 23635 - RNA, 22 nt, synthetic construct
  source 1..22: mol_type = other RNA
tgaccagcttatgctgtttgcc

SEQ ID NO: 23636 - RNA, 22 nt, synthetic construct
  source 1..22: mol_type = other RNA
tgacccaaacccagctcccctg

SEQ ID NO: 23637 - RNA, 22 nt, synthetic construct
  source 1..22: mol_type = other RNA
tgacccaacagcctctggccac

SEQ ID NO: 23638 - RNA, 22 nt, synthetic construct
  source 1..22: mol_type = other RNA
tgacccttggaaggacctggct

SEQ ID NO: 23639 - RNA, 22 nt, synthetic construct
  source 1..22: mol_type = other RNA
tgacctcatgctcttggccctc

SEQ ID NO: 23640 - RNA, 22 nt, synthetic construct
  source 1..22: mol_type = other RNA
tgacctgcccggttctcagtgg

SEQ ID NO: 23641 - RNA, 22 nt, synthetic construct
  source 1..22: mol_type = other RNA
tgacgcacggaggaacaatata

SEQ ID NO: 23642 - RNA, 22 nt, synthetic construct
  source 1..22: mol_type = other RNA
tgacgcggccgtctggtgcgtt

SEQ ID NO: 23643 - RNA, 22 nt, synthetic construct
  source 1..22: mol_type = other RNA
tgacgggggttttgccgtgtct

SEQ ID NO: 23644 - RNA, 22 nt, synthetic construct
  source 1..22: mol_type = other RNA
tgactcttgattcccggccagt

SEQ ID NO: 23645 - RNA, 22 nt, synthetic construct
  source 1..22: mol_type = other RNA
tgactgcttggcaaactcactc

SEQ ID NO: 23646 - RNA, 22 nt, synthetic construct
  source 1..22: mol_type = other RNA
tgagaaacggtggcccgtgtca

SEQ ID NO: 23647 - RNA, 22 nt, synthetic construct
  source 1..22: mol_type = other RNA
tgagaagccccctcccttcccc

SEQ ID NO: 23648 - RNA, 22 nt, synthetic construct
  source 1..22: mol_type = other RNA
tgagaagggaatccctcctctc

SEQ ID NO: 23649 - RNA, 22 nt, synthetic construct
  source 1..22: mol_type = other RNA
tgagaatggtgcgtcctaggtg

SEQ ID NO: 23650 - RNA, 22 nt, synthetic construct
  source 1..22: mol_type = other RNA
tgagacagctgcacacctgtgt

SEQ ID NO: 23651 - RNA, 22 nt, synthetic construct
  source 1..22: mol_type = other RNA
tgagataaggccagtagccagc

SEQ ID NO: 23652 - RNA, 22 nt, synthetic construct
  source 1..22: mol_type = other RNA
tgagatggtggacgaggaaggg

SEQ ID NO: 23653 - RNA, 22 nt, synthetic construct
  source 1..22: mol_type = other RNA
tgagcactgaaggcctggccgg

SEQ ID NO: 23654 - RNA, 22 nt, synthetic construct
  source 1..22: mol_type = other RNA
tgagcactggaagcgccacctg

SEQ ID NO: 23655 - RNA, 22 nt, synthetic construct
  source 1..22: mol_type = other RNA
tgagccccgttcccctgcatcc

SEQ ID NO: 23656 - RNA, 22 nt, synthetic construct
  source 1..22: mol_type = other RNA
tgagcgcctctcctgggcttgc

SEQ ID NO: 23657 - RNA, 22 nt, synthetic construct
  source 1..22: mol_type = other RNA
tgagctgctctgacgcggccgt

SEQ ID NO: 23658 - RNA, 22 nt, synthetic construct
  source 1..22: mol_type = other RNA
tgaggaaggagtgaagctaaac

SEQ ID NO: 23659 - RNA, 22 nt, synthetic construct
  source 1..22: mol_type = other RNA
tgaggaggggggtgtccgtgtg

SEQ ID NO: 23660 - RNA, 22 nt, synthetic construct
  source 1..22: mol_type = other RNA
tgaggccccctctgcacggggc

SEQ ID NO: 23661 - RNA, 22 nt, synthetic construct
  source 1..22: mol_type = other RNA
tgaggcctgggcaccagggact

SEQ ID NO: 23662 - RNA, 22 nt, synthetic construct
  source 1..22: mol_type = other RNA
tgaggctggtaccctgccccca

SEQ ID NO: 23663 - RNA, 22 nt, synthetic construct
  source 1..22: mol_type = other RNA
tgagggacttggggggtaattt

SEQ ID NO: 23664 - RNA, 22 nt, synthetic construct
  source 1..22: mol_type = other RNA
tgagggcggaagggctggggcc

SEQ ID NO: 23665 - RNA, 22 nt, synthetic construct
  source 1..22: mol_type = other RNA
tgagggtggagggactgggggc

SEQ ID NO: 23666 - RNA, 22 nt, synthetic construct
  source 1..22: mol_type = other RNA
tgagggtttcagtgctaaaact

SEQ ID NO: 23667 - RNA, 22 nt, synthetic construct
  source 1..22: mol_type = other RNA
tgaggtcatggaaactcgggct

SEQ ID NO: 23668 - RNA, 22 nt, synthetic construct
  source 1..22: mol_type = other RNA
tgagtccttggcaagcccagga

SEQ ID NO: 23669 - RNA, 22 nt, synthetic construct
  source 1..22: mol_type = other RNA
tgagtctgtcccagcacagggt

SEQ ID NO: 23670 - RNA, 22 nt, synthetic construct
  source 1..22: mol_type = other RNA
tgagttctaactttggctcttc

SEQ ID NO: 23671 - RNA, 22 nt, synthetic construct
  source 1..22: mol_type = other RNA
tgagtttgccaagcagtcaccc

SEQ ID NO: 23672 - RNA, 22 nt, synthetic construct
  source 1..22: mol_type = other RNA
tgataaacccacgtggggtacc

SEQ ID NO: 23673 - RNA, 22 nt, synthetic construct
  source 1..22: mol_type = other RNA
tgatcctggtgctgcagcttcc

SEQ ID NO: 23674 - RNA, 22 nt, synthetic construct
  source 1..22: mol_type = other RNA
tgattcccggccagtttctcca

SEQ ID NO: 23675 - RNA, 22 nt, synthetic construct
  source 1..22: mol_type = other RNA
tgattttgtttttccaaactgc

SEQ ID NO: 23676 - RNA, 22 nt, synthetic construct
  source 1..22: mol_type = other RNA
tgcaaacaggaagtgaacgggg

SEQ ID NO: 23677 - RNA, 22 nt, synthetic construct
  source 1..22: mol_type = other RNA
tgcacacctgtgtgcctgggcc

SEQ ID NO: 23678 - RNA, 22 nt, synthetic construct
  source 1..22: mol_type = other RNA
tgcaccccaattgccttagtgg

SEQ ID NO: 23679 - RNA, 22 nt, synthetic construct
  source 1..22: mol_type = other RNA
tgcacggggccctgcagccagg

SEQ ID NO: 23680 - RNA, 22 nt, synthetic construct
  source 1..22: mol_type = other RNA
tgcagagggggcctcagtgaac

SEQ ID NO: 23681 - RNA, 22 nt, synthetic construct
  source 1..22: mol_type = other RNA
tgcagagtatctgctggggtgg

SEQ ID NO: 23682 - RNA, 22 nt, synthetic construct
  source 1..22: mol_type = other RNA
tgcagatagccaggagtccttt

SEQ ID NO: 23683 - RNA, 22 nt, synthetic construct
  source 1..22: mol_type = other RNA
tgcagcaccaggatcagtgaaa

SEQ ID NO: 23684 - RNA, 22 nt, synthetic construct
  source 1..22: mol_type = other RNA
tgcagccaggggctgacacggg

SEQ ID NO: 23685 - RNA, 22 nt, synthetic construct
  source 1..22: mol_type = other RNA
tgcagctgtctcacccctctgg

SEQ ID NO: 23686 - RNA, 22 nt, synthetic construct
  source 1..22: mol_type = other RNA
tgcagcttccttacacttccca

SEQ ID NO: 23687 - RNA, 22 nt, synthetic construct
  source 1..22: mol_type = other RNA
tgcaggaacgaagccgtgggcc

SEQ ID NO: 23688 - RNA, 22 nt, synthetic construct
  source 1..22: mol_type = other RNA
tgcaggaatgggggcagggtac

SEQ ID NO: 23689 - RNA, 22 nt, synthetic construct
  source 1..22: mol_type = other RNA
tgcaggacgagaaacacagccc

SEQ ID NO: 23690 - RNA, 22 nt, synthetic construct
  source 1..22: mol_type = other RNA
tgcagggccccgtgcagagggg

SEQ ID NO: 23691 - RNA, 22 nt, synthetic construct
  source 1..22: mol_type = other RNA
tgcaggggaacggggatgcagg

SEQ ID NO: 23692 - RNA, 22 nt, synthetic construct
  source 1..22: mol_type = other RNA
tgcaggggaacggggctcagtc

SEQ ID NO: 23693 - RNA, 22 nt, synthetic construct
  source 1..22: mol_type = other RNA
tgcaggggaagggggatgcagg

SEQ ID NO: 23694 - RNA, 22 nt, synthetic construct
  source 1..22: mol_type = other RNA
tgcagggtggaggaaggccacc

SEQ ID NO: 23695 - RNA, 22 nt, synthetic construct
  source 1..22: mol_type = other RNA
tgcatagccctgggcccacggc

SEQ ID NO: 23696 - RNA, 22 nt, synthetic construct
  source 1..22: mol_type = other RNA
tgcatcccccagaggccccagg

SEQ ID NO: 23697 - RNA, 22 nt, synthetic construct
  source 1..22: mol_type = other RNA
tgcatcccccttcccctgcatc

SEQ ID NO: 23698 - RNA, 22 nt, synthetic construct
  source 1..22: mol_type = other RNA
tgcatccccgttcccctgcatc

SEQ ID NO: 23699 - RNA, 22 nt, synthetic construct
  source 1..22: mol_type = other RNA
tgcatccttctccaggcaggtc

SEQ ID NO: 23700 - RNA, 22 nt, synthetic construct
  source 1..22: mol_type = other RNA
tgccaagcagtcaccccacagt

SEQ ID NO: 23701 - RNA, 22 nt, synthetic construct
  source 1..22: mol_type = other RNA
tgccaaggactcaaacccagaa

SEQ ID NO: 23702 - RNA, 22 nt, synthetic construct
  source 1..22: mol_type = other RNA
tgccaggacggggctggctact

SEQ ID NO: 23703 - RNA, 22 nt, synthetic construct
  source 1..22: mol_type = other RNA
tgcccaggacagcctagtttta

SEQ ID NO: 23704 - RNA, 22 nt, synthetic construct
  source 1..22: mol_type = other RNA
tgcccaggcctcaggcatcttt

SEQ ID NO: 23705 - RNA, 22 nt, synthetic construct
  source 1..22: mol_type = other RNA
tgcccagtacaggcatccctgt

SEQ ID NO: 23706 - RNA, 22 nt, synthetic construct
  source 1..22: mol_type = other RNA
tgcccagtggtcaggccggcca

SEQ ID NO: 23707 - RNA, 22 nt, synthetic construct
  source 1..22: mol_type = other RNA
tgcccatctggaggaggcggga

SEQ ID NO: 23708 - RNA, 22 nt, synthetic construct
  source 1..22: mol_type = other RNA
tgccccaggccttgtggacact

SEQ ID NO: 23709 - RNA, 22 nt, synthetic construct
  source 1..22: mol_type = other RNA
tgcccccattcctgcaccccaa

SEQ ID NO: 23710 - RNA, 22 nt, synthetic construct
  source 1..22: mol_type = other RNA
tgcccccctcccctatcgccat

SEQ ID NO: 23711 - RNA, 22 nt, synthetic construct
  source 1..22: mol_type = other RNA
tgcccctggctctcctgcccct

SEQ ID NO: 23712 - RNA, 22 nt, synthetic construct
  source 1..22: mol_type = other RNA
tgccccttccctacaggggttc

SEQ ID NO: 23713 - RNA, 22 nt, synthetic construct
  source 1..22: mol_type = other RNA
tgcccggttctcagtggccacc

SEQ ID NO: 23714 - RNA, 22 nt, synthetic construct
  source 1..22: mol_type = other RNA
tgccctgggaacgggatgaact

SEQ ID NO: 23715 - RNA, 22 nt, synthetic construct
  source 1..22: mol_type = other RNA
tgccgtgtctaacaggtaccat

SEQ ID NO: 23716 - RNA, 22 nt, synthetic construct
  source 1..22: mol_type = other RNA
tgcctgaggcctgggcaccagg

SEQ ID NO: 23717 - RNA, 22 nt, synthetic construct
  source 1..22: mol_type = other RNA
tgcctggagaaggatgcaggac

SEQ ID NO: 23718 - RNA, 22 nt, synthetic construct
  source 1..22: mol_type = other RNA
tgcctgggccccaggctgtcac

SEQ ID NO: 23719 - RNA, 22 nt, synthetic construct
  source 1..22: mol_type = other RNA
tgcctgtactgggcaggtcctt

SEQ ID NO: 23720 - RNA, 22 nt, synthetic construct
  source 1..22: mol_type = other RNA
tgccttaaacccagccaggtcc

SEQ ID NO: 23721 - RNA, 22 nt, synthetic construct
  source 1..22: mol_type = other RNA
tgccttagtggctagggggttg

SEQ ID NO: 23722 - RNA, 22 nt, synthetic construct
  source 1..22: mol_type = other RNA
tgccttttgggtggattctcct

SEQ ID NO: 23723 - RNA, 22 nt, synthetic construct
  source 1..22: mol_type = other RNA
tgcgctaccctctcccagaacc

SEQ ID NO: 23724 - RNA, 22 nt, synthetic construct
  source 1..22: mol_type = other RNA
tgcggccccttcacagcccgag

SEQ ID NO: 23725 - RNA, 22 nt, synthetic construct
  source 1..22: mol_type = other RNA
tgcgggaaccccacatggtacc

SEQ ID NO: 23726 - RNA, 22 nt, synthetic construct
  source 1..22: mol_type = other RNA
tgcgtcagttttacctgtgaga

SEQ ID NO: 23727 - RNA, 22 nt, synthetic construct
  source 1..22: mol_type = other RNA
tgcgtcctaggtgttcaccagg

SEQ ID NO: 23728 - RNA, 22 nt, synthetic construct
  source 1..22: mol_type = other RNA
tgcgtgacctgcccggttctca

SEQ ID NO: 23729 - RNA, 22 nt, synthetic construct
  source 1..22: mol_type = other RNA
tgcgtttcactgatcctggtgc

SEQ ID NO: 23730 - RNA, 22 nt, synthetic construct
  source 1..22: mol_type = other RNA
tgctaaaactaggctgtcctgg

SEQ ID NO: 23731 - RNA, 22 nt, synthetic construct
  source 1..22: mol_type = other RNA
tgctaggacagtggggaaaatg

SEQ ID NO: 23732 - RNA, 22 nt, synthetic construct
  source 1..22: mol_type = other RNA
tgctatctgggacatattcctc

SEQ ID NO: 23733 - RNA, 22 nt, synthetic construct
  source 1..22: mol_type = other RNA
tgctcagactagggaagaggtt

SEQ ID NO: 23734 - RNA, 22 nt, synthetic construct
  source 1..22: mol_type = other RNA
tgctcagtggaaaccacgaaag

SEQ ID NO: 23735 - RNA, 22 nt, synthetic construct
  source 1..22: mol_type = other RNA
tgctccaggcctcctgggatac

SEQ ID NO: 23736 - RNA, 22 nt, synthetic construct
  source 1..22: mol_type = other RNA
tgctctccttgcccccctcccc

SEQ ID NO: 23737 - RNA, 22 nt, synthetic construct
  source 1..22: mol_type = other RNA
tgctctgacgcggccgtctggt

SEQ ID NO: 23738 - RNA, 22 nt, synthetic construct
  source 1..22: mol_type = other RNA
tgctctgggcggaggaatatgt

SEQ ID NO: 23739 - RNA, 22 nt, synthetic construct
  source 1..22: mol_type = other RNA
tgctctgggcttctgggtttga

SEQ ID NO: 23740 - RNA, 22 nt, synthetic construct
  source 1..22: mol_type = other RNA
tgctcttcagactgagccccgt

SEQ ID NO: 23741 - RNA, 22 nt, synthetic construct
  source 1..22: mol_type = other RNA
tgctcttggccctcgtagctcc

SEQ ID NO: 23742 - RNA, 22 nt, synthetic construct
  source 1..22: mol_type = other RNA
tgctgcagcttccttacacttc

SEQ ID NO: 23743 - RNA, 22 nt, synthetic construct
  source 1..22: mol_type = other RNA
tgctgggacagactcaggggcc

SEQ ID NO: 23744 - RNA, 22 nt, synthetic construct
  source 1..22: mol_type = other RNA
tgctggggtggtttccgagctt

SEQ ID NO: 23745 - RNA, 22 nt, synthetic construct
  source 1..22: mol_type = other RNA
tgctgtggctgttcccaagttc

SEQ ID NO: 23746 - RNA, 22 nt, synthetic construct
  source 1..22: mol_type = other RNA
tgctgtttgcccaggacagcct

SEQ ID NO: 23747 - RNA, 22 nt, synthetic construct
  source 1..22: mol_type = other RNA
tgcttctcctcttgggaagtgt

SEQ ID NO: 23748 - RNA, 22 nt, synthetic construct
  source 1..22: mol_type = other RNA
tgcttcttggccacgtaacctg

SEQ ID NO: 23749 - RNA, 22 nt, synthetic construct
  source 1..22: mol_type = other RNA
tgcttggcaaactcactcttcg

SEQ ID NO: 23750 - RNA, 22 nt, synthetic construct
  source 1..22: mol_type = other RNA
tgcttggggacctgcctggaga

SEQ ID NO: 23751 - RNA, 22 nt, synthetic construct
  source 1..22: mol_type = other RNA
tggaaaaacaaaatcagaataa

SEQ ID NO: 23752 - RNA, 22 nt, synthetic construct
  source 1..22: mol_type = other RNA
tggaaaactccctttgtgagaa

SEQ ID NO: 23753 - RNA, 22 nt, synthetic construct
  source 1..22: mol_type = other RNA
tggaaaccacgaaaggactcct

SEQ ID NO: 23754 - RNA, 22 nt, synthetic construct
  source 1..22: mol_type = other RNA
tggaaactcgggctgtgaaggg

SEQ ID NO: 23755 - RNA, 22 nt, synthetic construct
  source 1..22: mol_type = other RNA
tggaaataaacgagccgagttc

SEQ ID NO: 23756 - RNA, 22 nt, synthetic construct
  source 1..22: mol_type = other RNA
tggaacctcttccctagtctga

SEQ ID NO: 23757 - RNA, 22 nt, synthetic construct
  source 1..22: mol_type = other RNA
tggaagcgccacctgtgggtgg

SEQ ID NO: 23758 - RNA, 22 nt, synthetic construct
  source 1..22: mol_type = other RNA
tggaaggacctggctgggttta

SEQ ID NO: 23759 - RNA, 22 nt, synthetic construct
  source 1..22: mol_type = other RNA
tggacactgggtgggctccggg

SEQ ID NO: 23760 - RNA, 22 nt, synthetic construct
  source 1..22: mol_type = other RNA
tggaccccacgagaggccaccc

SEQ ID NO: 23761 - RNA, 22 nt, synthetic construct
  source 1..22: mol_type = other RNA
tggacccctaagggaagaatga

SEQ ID NO: 23762 - RNA, 22 nt, synthetic construct
  source 1..22: mol_type = other RNA
tggacccctgggtctgaatggg

SEQ ID NO: 23763 - RNA, 22 nt, synthetic construct
  source 1..22: mol_type = other RNA
tggacgaggaagggggacaggg

SEQ ID NO: 23764 - RNA, 22 nt, synthetic construct
  source 1..22: mol_type = other RNA
tggactcctgggtctgagggtg

SEQ ID NO: 23765 - RNA, 22 nt, synthetic construct
  source 1..22: mol_type = other RNA
tggactccttcatctgagggcg

SEQ ID NO: 23766 - RNA, 22 nt, synthetic construct
  source 1..22: mol_type = other RNA
tggactcgtgggtctgagggag

SEQ ID NO: 23767 - RNA, 22 nt, synthetic construct
  source 1..22: mol_type = other RNA
tggactctggagtccctggtgc

SEQ ID NO: 23768 - RNA, 22 nt, synthetic construct
  source 1..22: mol_type = other RNA
tggacttcggcttttgtccccc

SEQ ID NO: 23769 - RNA, 22 nt, synthetic construct
  source 1..22: mol_type = other RNA
tggacttctgggtcttagggag

SEQ ID NO: 23770 - RNA, 22 nt, synthetic construct
  source 1..22: mol_type = other RNA
tggagaaactggccgggaatca

SEQ ID NO: 23771 - RNA, 22 nt, synthetic construct
  source 1..22: mol_type = other RNA
tggagaaagagaaagggagtag

SEQ ID NO: 23772 - RNA, 22 nt, synthetic construct
  source 1..22: mol_type = other RNA
tggagaaggatgcaggacgaga

SEQ ID NO: 23773 - RNA, 22 nt, synthetic construct
  source 1..22: mol_type = other RNA
tggagaggtgagggacttgggg

SEQ ID NO: 23774 - RNA, 22 nt, synthetic construct
  source 1..22: mol_type = other RNA
tggagcattggggtgggctggg

SEQ ID NO: 23775 - RNA, 22 nt, synthetic construct
  source 1..22: mol_type = other RNA
tggagccaggattcttagggct

SEQ ID NO: 23776 - RNA, 22 nt, synthetic construct
  source 1..22: mol_type = other RNA
tggagctgaggaaggagtgaag

SEQ ID NO: 23777 - RNA, 22 nt, synthetic construct
  source 1..22: mol_type = other RNA
tggaggaaggccaccctgtgct

SEQ ID NO: 23778 - RNA, 22 nt, synthetic construct
  source 1..22: mol_type = other RNA
tggaggagaatccacccaaaag

SEQ ID NO: 23779 - RNA, 22 nt, synthetic construct
  source 1..22: mol_type = other RNA
tggaggaggcgggagggagcta

SEQ ID NO: 23780 - RNA, 22 nt, synthetic construct
  source 1..22: mol_type = other RNA
tggagggactgggggcctggac

SEQ ID NO: 23781 - RNA, 22 nt, synthetic construct
  source 1..22: mol_type = other RNA
tggagtcccgacttgctgggac

SEQ ID NO: 23782 - RNA, 22 nt, synthetic construct
  source 1..22: mol_type = other RNA
tggagtccctggtgcccaggcc

SEQ ID NO: 23783 - RNA, 22 nt, synthetic construct
  source 1..22: mol_type = other RNA
tggagtgtgacagcctggggcc

SEQ ID NO: 23784 - RNA, 22 nt, synthetic construct
  source 1..22: mol_type = other RNA
tggatctaggagtttagcttca

SEQ ID NO: 23785 - RNA, 22 nt, synthetic construct
  source 1..22: mol_type = other RNA
tggatctgttttcgtggctccc

SEQ ID NO: 23786 - RNA, 22 nt, synthetic construct
  source 1..22: mol_type = other RNA
tggattctcctccaactgtggg

SEQ ID NO: 23787 - RNA, 22 nt, synthetic construct
  source 1..22: mol_type = other RNA
tggcaaactcactcttcggggt

SEQ ID NO: 23788 - RNA, 22 nt, synthetic construct
  source 1..22: mol_type = other RNA
tggcaagcccaggagaggcgct

SEQ ID NO: 23789 - RNA, 22 nt, synthetic construct
  source 1..22: mol_type = other RNA
tggcagggctgtggtgaggagg

SEQ ID NO: 23790 - RNA, 22 nt, synthetic construct
  source 1..22: mol_type = other RNA
tggccaagaagcaggggagctg

SEQ ID NO: 23791 - RNA, 22 nt, synthetic construct
  source 1..22: mol_type = other RNA
tggccaccctgcgctaccctct

SEQ ID NO: 23792 - RNA, 22 nt, synthetic construct
  source 1..22: mol_type = other RNA
tggccacgtaacctgagaaggg

SEQ ID NO: 23793 - RNA, 22 nt, synthetic construct
  source 1..22: mol_type = other RNA
tggccactgagaaccgggcagg

SEQ ID NO: 23794 - RNA, 22 nt, synthetic construct
  source 1..22: mol_type = other RNA
tggccactggctgtttaagata

SEQ ID NO: 23795 - RNA, 22 nt, synthetic construct
  source 1..22: mol_type = other RNA
tggccagaggctgttgggtcat

SEQ ID NO: 23796 - RNA, 22 nt, synthetic construct
  source 1..22: mol_type = other RNA
tggcccccagcccctcctgcct

SEQ ID NO: 23797 - RNA, 22 nt, synthetic construct
  source 1..22: mol_type = other RNA
tggcccgtgtcagcccctggct

SEQ ID NO: 23798 - RNA, 22 nt, synthetic construct
  source 1..22: mol_type = other RNA
tggccctcgtagctccctcccg

SEQ ID NO: 23799 - RNA, 22 nt, synthetic construct
  source 1..22: mol_type = other RNA
tggccgcctctactccctttct

SEQ ID NO: 23800 - RNA, 22 nt, synthetic construct
  source 1..22: mol_type = other RNA
tggccggcctgaccactgggca

SEQ ID NO: 23801 - RNA, 22 nt, synthetic construct
  source 1..22: mol_type = other RNA
tggccgggaatcaagagtcacc

SEQ ID NO: 23802 - RNA, 22 nt, synthetic construct
  source 1..22: mol_type = other RNA
tggcctcctgggttgaatgggg

SEQ ID NO: 23803 - RNA, 22 nt, synthetic construct
  source 1..22: mol_type = other RNA
tggcctctcgtggggtccaggc

SEQ ID NO: 23804 - RNA, 22 nt, synthetic construct
  source 1..22: mol_type = other RNA
tggcctggaccccacgagaggc

SEQ ID NO: 23805 - RNA, 22 nt, synthetic construct
  source 1..22: mol_type = other RNA
tggcctggggcctctgggggat

SEQ ID NO: 23806 - RNA, 22 nt, synthetic construct
  source 1..22: mol_type = other RNA
tggccttatctcacaggtaaaa

SEQ ID NO: 23807 - RNA, 22 nt, synthetic construct
  source 1..22: mol_type = other RNA
tggccttcctccaccctgcata

SEQ ID NO: 23808 - RNA, 22 nt, synthetic construct
  source 1..22: mol_type = other RNA
tggcgataggggaggggggcaa

SEQ ID NO: 23809 - RNA, 22 nt, synthetic construct
  source 1..22: mol_type = other RNA
tggcgcttccagtgctcagact

SEQ ID NO: 23810 - RNA, 22 nt, synthetic construct
  source 1..22: mol_type = other RNA
tggctactggccttatctcaca

SEQ ID NO: 23811 - RNA, 22 nt, synthetic construct
  source 1..22: mol_type = other RNA
tggctagggggttgggggctag

SEQ ID NO: 23812 - RNA, 22 nt, synthetic construct
  source 1..22: mol_type = other RNA
tggctatctgcaaacaggaagt

SEQ ID NO: 23813 - RNA, 22 nt, synthetic construct
  source 1..22: mol_type = other RNA
tggctccagcccctcctactct

SEQ ID NO: 23814 - RNA, 22 nt, synthetic construct
  source 1..22: mol_type = other RNA
tggctccctctggagtcccgac

SEQ ID NO: 23815 - RNA, 22 nt, synthetic construct
  source 1..22: mol_type = other RNA
tggctctcctgccccttcccta

SEQ ID NO: 23816 - RNA, 22 nt, synthetic construct
  source 1..22: mol_type = other RNA
tggctctgaaggaggaggggct

SEQ ID NO: 23817 - RNA, 22 nt, synthetic construct
  source 1..22: mol_type = other RNA
tggctctgctcttcagactgag

SEQ ID NO: 23818 - RNA, 22 nt, synthetic construct
  source 1..22: mol_type = other RNA
tggctcttcacctttctagtcc

SEQ ID NO: 23819 - RNA, 22 nt, synthetic construct
  source 1..22: mol_type = other RNA
tggctgcagggccccgtgcaga

SEQ ID NO: 23820 - RNA, 22 nt, synthetic construct
  source 1..22: mol_type = other RNA
tggctgggtttaaggcaggagg

SEQ ID NO: 23821 - RNA, 22 nt, synthetic construct
  source 1..22: mol_type = other RNA
tggctgttcccaagttcttagg

SEQ ID NO: 23822 - RNA, 22 nt, synthetic construct
  source 1..22: mol_type = other RNA
tggctgtttaagatacgcctgg

SEQ ID NO: 23823 - RNA, 22 nt, synthetic construct
  source 1..22: mol_type = other RNA
tgggaacagccacagcaggggg

SEQ ID NO: 23824 - RNA, 22 nt, synthetic construct
  source 1..22: mol_type = other RNA
tgggaacgggatgaactcggct

SEQ ID NO: 23825 - RNA, 22 nt, synthetic construct
  source 1..22: mol_type = other RNA
tgggaagtgtaaggaagctgca

SEQ ID NO: 23826 - RNA, 22 nt, synthetic construct
  source 1..22: mol_type = other RNA
tgggacagactcaggggcctgg

SEQ ID NO: 23827 - RNA, 22 nt, synthetic construct
  source 1..22: mol_type = other RNA
tgggacatattcctccgcccag

SEQ ID NO: 23828 - RNA, 22 nt, synthetic construct
  source 1..22: mol_type = other RNA
tgggagagggtagcgcagggtg

SEQ ID NO: 23829 - RNA, 22 nt, synthetic construct
  source 1..22: mol_type = other RNA
tgggagtcccgcccaggcccct

SEQ ID NO: 23830 - RNA, 22 nt, synthetic construct
  source 1..22: mol_type = other RNA
tgggataccccgaagagtgagt

SEQ ID NO: 23831 - RNA, 22 nt, synthetic construct
  source 1..22: mol_type = other RNA
tgggcaaacagcataagctggt

SEQ ID NO: 23832 - RNA, 22 nt, synthetic construct
  source 1..22: mol_type = other RNA
tgggcaaccaggcgtatcttaa

SEQ ID NO: 23833 - RNA, 22 nt, synthetic construct
  source 1..22: mol_type = other RNA
tgggcaccagggactccagagt

SEQ ID NO: 23834 - RNA, 22 nt, synthetic construct
  source 1..22: mol_type = other RNA
tgggcagctttggagaggtgag

SEQ ID NO: 23835 - RNA, 22 nt, synthetic construct
  source 1..22: mol_type = other RNA
tgggcaggtccttgaaagggaa

SEQ ID NO: 23836 - RNA, 22 nt, synthetic construct
  source 1..22: mol_type = other RNA
tgggcccacggcttcgttcctg

SEQ ID NO: 23837 - RNA, 22 nt, synthetic construct
  source 1..22: mol_type = other RNA
tgggcccagggctatgcagggt

SEQ ID NO: 23838 - RNA, 22 nt, synthetic construct
  source 1..22: mol_type = other RNA
tgggccccaggctgtcacactc

SEQ ID NO: 23839 - RNA, 22 nt, synthetic construct
  source 1..22: mol_type = other RNA
tgggcctggacccctgggtctg

SEQ ID NO: 23840 - RNA, 22 nt, synthetic construct
  source 1..22: mol_type = other RNA
tgggcctggactctggagtccc

SEQ ID NO: 23841 - RNA, 22 nt, synthetic construct
  source 1..22: mol_type = other RNA
tgggcctttccctttcaaggac

SEQ ID NO: 23842 - RNA, 22 nt, synthetic construct
  source 1..22: mol_type = other RNA
tgggcggaggaatatgtcccag

SEQ ID NO: 23843 - RNA, 22 nt, synthetic construct
  source 1..22: mol_type = other RNA
tgggcgggactcccagaggggt

SEQ ID NO: 23844 - RNA, 22 nt, synthetic construct
  source 1..22: mol_type = other RNA
tgggctccgggacctgaactgg

SEQ ID NO: 23845 - RNA, 22 nt, synthetic construct
  source 1..22: mol_type = other RNA
tgggctcctgggtttgagagag

SEQ ID NO: 23846 - RNA, 22 nt, synthetic construct
  source 1..22: mol_type = other RNA
tgggctggggttcagagaggag

SEQ ID NO: 23847 - RNA, 22 nt, synthetic construct
  source 1..22: mol_type = other RNA
tgggcttctgggtttgagtcct

SEQ ID NO: 23848 - RNA, 22 nt, synthetic construct
  source 1..22: mol_type = other RNA
tgggcttgccaaggactcaaac

SEQ ID NO: 23849 - RNA, 22 nt, synthetic construct
  source 1..22: mol_type = other RNA
tggggaaaatgacccaacagcc

SEQ ID NO: 23850 - RNA, 22 nt, synthetic construct
  source 1..22: mol_type = other RNA
tggggacctgcctggagaagga

SEQ ID NO: 23851 - RNA, 22 nt, synthetic construct
  source 1..22: mol_type = other RNA
tggggactagaaaggtgaagag

SEQ ID NO: 23852 - RNA, 22 nt, synthetic construct
  source 1..22: mol_type = other RNA
tggggactctttaaggaaagaa

SEQ ID NO: 23853 - RNA, 22 nt, synthetic construct
  source 1..22: mol_type = other RNA
tggggagaggctgggggcctgg

SEQ ID NO: 23854 - RNA, 22 nt, synthetic construct
  source 1..22: mol_type = other RNA
tggggaggggttgggcctggac

SEQ ID NO: 23855 - RNA, 22 nt, synthetic construct
  source 1..22: mol_type = other RNA
tggggcaagtccctcctccgac

SEQ ID NO: 23856 - RNA, 22 nt, synthetic construct
  source 1..22: mol_type = other RNA
tggggcccaggcacacaggtgt

SEQ ID NO: 23857 - RNA, 22 nt, synthetic construct
  source 1..22: mol_type = other RNA
tggggcctctgggggatgcagg

SEQ ID NO: 23858 - RNA, 22 nt, synthetic construct
  source 1..22: mol_type = other RNA
tggggcctggactcctgggtcc

SEQ ID NO: 23859 - RNA, 22 nt, synthetic construct
  source 1..22: mol_type = other RNA
tggggcctggactcctgggtct

SEQ ID NO: 23860 - RNA, 22 nt, synthetic construct
  source 1..22: mol_type = other RNA
tggggcctggcctcctgggttg

SEQ ID NO: 23861 - RNA, 22 nt, synthetic construct
  source 1..22: mol_type = other RNA
tggggctgtgtttctcgtcctg

SEQ ID NO: 23862 - RNA, 22 nt, synthetic construct
  source 1..22: mol_type = other RNA
tgggggatgcaggggaaggggg

SEQ ID NO: 23863 - RNA, 22 nt, synthetic construct
  source 1..22: mol_type = other RNA
tgggggcagggtaccagcctca

SEQ ID NO: 23864 - RNA, 22 nt, synthetic construct
  source 1..22: mol_type = other RNA
tgggggccaggactcctggctc

SEQ ID NO: 23865 - RNA, 22 nt, synthetic construct
  source 1..22: mol_type = other RNA
tgggggcctggactccttcatc

SEQ ID NO: 23866 - RNA, 22 nt, synthetic construct
  source 1..22: mol_type = other RNA
tgggggcctggacttctgggtc

SEQ ID NO: 23867 - RNA, 22 nt, synthetic construct
  source 1..22: mol_type = other RNA
tgggggcctgggctcctgggtt

SEQ ID NO: 23868 - RNA, 22 nt, synthetic construct
  source 1..22: mol_type = other RNA
tgggggctagagtaggaggggc

SEQ ID NO: 23869 - RNA, 22 nt, synthetic construct
  source 1..22: mol_type = other RNA
tggggggacaaaagccgaagtc

SEQ ID NO: 23870 - RNA, 22 nt, synthetic construct
  source 1..22: mol_type = other RNA
tggggggtaatttatcccgtgg

SEQ ID NO: 23871 - RNA, 22 nt, synthetic construct
  source 1..22: mol_type = other RNA
tggggtaccctaagaacttggg

SEQ ID NO: 23872 - RNA, 22 nt, synthetic construct
  source 1..22: mol_type = other RNA
tggggtccaggccaagtaggtg

SEQ ID NO: 23873 - RNA, 22 nt, synthetic construct
  source 1..22: mol_type = other RNA
tggggtgaccagcttatgctgt

SEQ ID NO: 23874 - RNA, 22 nt, synthetic construct
  source 1..22: mol_type = other RNA
tggggtgactgcttggcaaact

SEQ ID NO: 23875 - RNA, 22 nt, synthetic construct
  source 1..22: mol_type = other RNA
tggggtgcaggaatgggggcag

SEQ ID NO: 23876 - RNA, 22 nt, synthetic construct
  source 1..22: mol_type = other RNA
tggggtggcctctcgtggggtc

SEQ ID NO: 23877 - RNA, 22 nt, synthetic construct
  source 1..22: mol_type = other RNA
tggggtgggctggggttcagag

SEQ ID NO: 23878 - RNA, 22 nt, synthetic construct
  source 1..22: mol_type = other RNA
tggggtggtttccgagcttgac

SEQ ID NO: 23879 - RNA, 22 nt, synthetic construct
  source 1..22: mol_type = other RNA
tggggttcagagaggagggatt

SEQ ID NO: 23880 - RNA, 22 nt, synthetic construct
  source 1..22: mol_type = other RNA
tggggttcccgcacccagatga

SEQ ID NO: 23881 - RNA, 22 nt, synthetic construct
  source 1..22: mol_type = other RNA
tgggtcaggtctgggtgtgggg

SEQ ID NO: 23882 - RNA, 22 nt, synthetic construct
  source 1..22: mol_type = other RNA
tgggtcattttccccactgtcc

SEQ ID NO: 23883 - RNA, 22 nt, synthetic construct
  source 1..22: mol_type = other RNA
tgggtctgaatggggagaggct

SEQ ID NO: 23884 - RNA, 22 nt, synthetic construct
  source 1..22: mol_type = other RNA
tgggtctgagggtggagggact

SEQ ID NO: 23885 - RNA, 22 nt, synthetic construct
  source 1..22: mol_type = other RNA
tgggtcttagggaggcggggct

SEQ ID NO: 23886 - RNA, 22 nt, synthetic construct
  source 1..22: mol_type = other RNA
tgggtgactcttgattcccggc

SEQ ID NO: 23887 - RNA, 22 nt, synthetic construct
  source 1..22: mol_type = other RNA
tgggtgcgggaaccccacatgg

SEQ ID NO: 23888 - RNA, 22 nt, synthetic construct
  source 1..22: mol_type = other RNA
tgggtggaaataaacgagccga

SEQ ID NO: 23889 - RNA, 22 nt, synthetic construct
  source 1..22: mol_type = other RNA
tgggtggattctcctccaactg

SEQ ID NO: 23890 - RNA, 22 nt, synthetic construct
  source 1..22: mol_type = other RNA
tgggtgggctccgggacctgaa

SEQ ID NO: 23891 - RNA, 22 nt, synthetic construct
  source 1..22: mol_type = other RNA
tgggtggtgacgggggttttgc

SEQ ID NO: 23892 - RNA, 22 nt, synthetic construct
  source 1..22: mol_type = other RNA
tgggtgtggggtgaccagctta

SEQ ID NO: 23893 - RNA, 22 nt, synthetic construct
  source 1..22: mol_type = other RNA
tgggttgaatggggaggggttg

SEQ ID NO: 23894 - RNA, 22 nt, synthetic construct
  source 1..22: mol_type = other RNA
tgggtttaaggcaggaggggct

SEQ ID NO: 23895 - RNA, 22 nt, synthetic construct
  source 1..22: mol_type = other RNA
tgggtttatcaaccacttggtg

SEQ ID NO: 23896 - RNA, 22 nt, synthetic construct
  source 1..22: mol_type = other RNA
tgggtttgagagaggaggggct

SEQ ID NO: 23897 - RNA, 22 nt, synthetic construct
  source 1..22: mol_type = other RNA
tgggtttgagtccttggcaagc

SEQ ID NO: 23898 - RNA, 22 nt, synthetic construct
  source 1..22: mol_type = other RNA
tgggtttgggtcaggtctgggt

SEQ ID NO: 23899 - RNA, 22 nt, synthetic construct
  source 1..22: mol_type = other RNA
tggtaccctgcccccattcctg

SEQ ID NO: 23900 - RNA, 22 nt, synthetic construct
  source 1..22: mol_type = other RNA
tggtacctgttagacacggcaa

SEQ ID NO: 23901 - RNA, 22 nt, synthetic construct
  source 1..22: mol_type = other RNA
tggtagacagggctggggtggc

SEQ ID NO: 23902 - RNA, 22 nt, synthetic construct
  source 1..22: mol_type = other RNA
tggtcaccccacacccagacct

SEQ ID NO: 23903 - RNA, 22 nt, synthetic construct
  source 1..22: mol_type = other RNA
tggtcactgtctctgggtgact

SEQ ID NO: 23904 - RNA, 22 nt, synthetic construct
  source 1..22: mol_type = other RNA
tggtcaggccggccaggccttc

SEQ ID NO: 23905 - RNA, 22 nt, synthetic construct
  source 1..22: mol_type = other RNA
tggtcctgagttctaactttgg

SEQ ID NO: 23906 - RNA, 22 nt, synthetic construct
  source 1..22: mol_type = other RNA
tggtgaacacctaggacgcacc

SEQ ID NO: 23907 - RNA, 22 nt, synthetic construct
  source 1..22: mol_type = other RNA
tggtgacgggggttttgccgtg

SEQ ID NO: 23908 - RNA, 22 nt, synthetic construct
  source 1..22: mol_type = other RNA
tggtgaggaggggggtgtccgt

SEQ ID NO: 23909 - RNA, 22 nt, synthetic construct
  source 1..22: mol_type = other RNA
tggtgaggctggtaccctgccc

SEQ ID NO: 23910 - RNA, 22 nt, synthetic construct
  source 1..22: mol_type = other RNA
tggtgcccaggcctcaggcatc

SEQ ID NO: 23911 - RNA, 22 nt, synthetic construct
  source 1..22: mol_type = other RNA
tggtgcgtcctaggtgttcacc

SEQ ID NO: 23912 - RNA, 22 nt, synthetic construct
  source 1..22: mol_type = other RNA
tggtgcgtttcactgatcctgg

SEQ ID NO: 23913 - RNA, 22 nt, synthetic construct
  source 1..22: mol_type = other RNA
tggtgctgcagcttccttacac

SEQ ID NO: 23914 - RNA, 22 nt, synthetic construct
  source 1..22: mol_type = other RNA
tggtggacgaggaagggggaca

SEQ ID NO: 23915 - RNA, 22 nt, synthetic construct
  source 1..22: mol_type = other RNA
tggttgataaacccacgtgggg

SEQ ID NO: 23916 - RNA, 22 nt, synthetic construct
  source 1..22: mol_type = other RNA
tggttgcccagtggtcaggccg

SEQ ID NO: 23917 - RNA, 22 nt, synthetic construct
  source 1..22: mol_type = other RNA
tggttggtcactgtctctgggt

SEQ ID NO: 23918 - RNA, 22 nt, synthetic construct
  source 1..22: mol_type = other RNA
tggtttccactgagcactgaag

SEQ ID NO: 23919 - RNA, 22 nt, synthetic construct
  source 1..22: mol_type = other RNA
tggtttccgagcttgacccttg

SEQ ID NO: 23920 - RNA, 22 nt, synthetic construct
  source 1..22: mol_type = other RNA
tgtaaggaagctgcagcaccag

SEQ ID NO: 23921 - RNA, 22 nt, synthetic construct
  source 1..22: mol_type = other RNA
tgtactgggcaggtccttgaaa

SEQ ID NO: 23922 - RNA, 22 nt, synthetic construct
  source 1..22: mol_type = other RNA
tgtagggaaggggcaggagagc

SEQ ID NO: 23923 - RNA, 22 nt, synthetic construct
  source 1..22: mol_type = other RNA
tgtcacactccagttcactgag

SEQ ID NO: 23924 - RNA, 22 nt, synthetic construct
  source 1..22: mol_type = other RNA
tgtcagcccctggctgcagggc

SEQ ID NO: 23925 - RNA, 22 nt, synthetic construct
  source 1..22: mol_type = other RNA
tgtcatggcgataggggagggg

SEQ ID NO: 23926 - RNA, 22 nt, synthetic construct
  source 1..22: mol_type = other RNA
tgtccacaaggcctggggcaag

SEQ ID NO: 23927 - RNA, 22 nt, synthetic construct
  source 1..22: mol_type = other RNA
tgtcccagatagcactggggac

SEQ ID NO: 23928 - RNA, 22 nt, synthetic construct
  source 1..22: mol_type = other RNA
tgtcccagcaagtcgggactcc

SEQ ID NO: 23929 - RNA, 22 nt, synthetic construct
  source 1..22: mol_type = other RNA
tgtcccagcacagggtggcctt

SEQ ID NO: 23930 - RNA, 22 nt, synthetic construct
  source 1..22: mol_type = other RNA
tgtccccccaagttttggaccc

SEQ ID NO: 23931 - RNA, 22 nt, synthetic construct
  source 1..22: mol_type = other RNA
tgtcccccttcctcgtccacca

SEQ ID NO: 23932 - RNA, 22 nt, synthetic construct
  source 1..22: mol_type = other RNA
tgtccctggatctgttttcgtg

SEQ ID NO: 23933 - RNA, 22 nt, synthetic construct
  source 1..22: mol_type = other RNA
tgtccgtgtggaaaactccctt

SEQ ID NO: 23934 - RNA, 22 nt, synthetic construct
  source 1..22: mol_type = other RNA
tgtcctagcaccgtgtccctgg

SEQ ID NO: 23935 - RNA, 22 nt, synthetic construct
  source 1..22: mol_type = other RNA
tgtcctgggcaaacagcataag

SEQ ID NO: 23936 - RNA, 22 nt, synthetic construct
  source 1..22: mol_type = other RNA
tgtctaacaggtaccatgtggg

SEQ ID NO: 23937 - RNA, 22 nt, synthetic construct
  source 1..22: mol_type = other RNA
tgtctaccaggctgccttttgg

SEQ ID NO: 23938 - RNA, 22 nt, synthetic construct
  source 1..22: mol_type = other RNA
tgtctcacccctctgggagtcc

SEQ ID NO: 23939 - RNA, 22 nt, synthetic construct
  source 1..22: mol_type = other RNA
tgtctctgggtgactcttgatt

SEQ ID NO: 23940 - RNA, 22 nt, synthetic construct
  source 1..22: mol_type = other RNA
tgtgaaagatgcctgaggcctg

SEQ ID NO: 23941 - RNA, 22 nt, synthetic construct
  source 1..22: mol_type = other RNA
tgtgaaggggccgcacgtgccc

SEQ ID NO: 23942 - RNA, 22 nt, synthetic construct
  source 1..22: mol_type = other RNA
tgtgacagcctggggcccaggc

SEQ ID NO: 23943 - RNA, 22 nt, synthetic construct
  source 1..22: mol_type = other RNA
tgtgagaatggtgcgtcctagg

SEQ ID NO: 23944 - RNA, 22 nt, synthetic construct
  source 1..22: mol_type = other RNA
tgtgagataaggccagtagcca

SEQ ID NO: 23945 - RNA, 22 nt, synthetic construct
  source 1..22: mol_type = other RNA
tgtgcagctgtctcacccctct

SEQ ID NO: 23946 - RNA, 22 nt, synthetic construct
  source 1..22: mol_type = other RNA
tgtgcctgggccccaggctgtc

SEQ ID NO: 23947 - RNA, 22 nt, synthetic construct
  source 1..22: mol_type = other RNA
tgtgctgggacagactcagggg

SEQ ID NO: 23948 - RNA, 22 nt, synthetic construct
  source 1..22: mol_type = other RNA
tgtggaaaactccctttgtgag

SEQ ID NO: 23949 - RNA, 22 nt, synthetic construct
  source 1..22: mol_type = other RNA
tgtggacactgggtgggctccg

SEQ ID NO: 23950 - RNA, 22 nt, synthetic construct
  source 1..22: mol_type = other RNA
tgtggctgttcccaagttctta

SEQ ID NO: 23951 - RNA, 22 nt, synthetic construct
  source 1..22: mol_type = other RNA
tgtggggtgaccagcttatgct

SEQ ID NO: 23952 - RNA, 22 nt, synthetic construct
  source 1..22: mol_type = other RNA
tgtggggtgactgcttggcaaa

SEQ ID NO: 23953 - RNA, 22 nt, synthetic construct
  source 1..22: mol_type = other RNA
tgtggggttcccgcacccagat

SEQ ID NO: 23954 - RNA, 22 nt, synthetic construct
  source 1..22: mol_type = other RNA
tgtgggtggtgacgggggtttt

SEQ ID NO: 23955 - RNA, 22 nt, synthetic construct
  source 1..22: mol_type = other RNA
tgtggtgaggaggggggtgtcc

SEQ ID NO: 23956 - RNA, 22 nt, synthetic construct
  source 1..22: mol_type = other RNA
tgtgtgcctgggccccaggctg

SEQ ID NO: 23957 - RNA, 22 nt, synthetic construct
  source 1..22: mol_type = other RNA
tgtgtttctcgtcctgcatcct

SEQ ID NO: 23958 - RNA, 22 nt, synthetic construct
  source 1..22: mol_type = other RNA
tgttagacacggcaaaaccccc

SEQ ID NO: 23959 - RNA, 22 nt, synthetic construct
  source 1..22: mol_type = other RNA
tgttcaccaggtcgtggccgcc

SEQ ID NO: 23960 - RNA, 22 nt, synthetic construct
  source 1..22: mol_type = other RNA
tgttcagccctaagaatcctgg

SEQ ID NO: 23961 - RNA, 22 nt, synthetic construct
  source 1..22: mol_type = other RNA
tgttcccaagttcttagggtac

SEQ ID NO: 23962 - RNA, 22 nt, synthetic construct
  source 1..22: mol_type = other RNA
tgttcctccgtgcgtcagtttt

SEQ ID NO: 23963 - RNA, 22 nt, synthetic construct
  source 1..22: mol_type = other RNA
tgttgggtcattttccccactg

SEQ ID NO: 23964 - RNA, 22 nt, synthetic construct
  source 1..22: mol_type = other RNA
tgtttaagatacgcctggttgc

SEQ ID NO: 23965 - RNA, 22 nt, synthetic construct
  source 1..22: mol_type = other RNA
tgtttctcgtcctgcatccttc

SEQ ID NO: 23966 - RNA, 22 nt, synthetic construct
  source 1..22: mol_type = other RNA
tgtttgcagatagccaggagtc

SEQ ID NO: 23967 - RNA, 22 nt, synthetic construct
  source 1..22: mol_type = other RNA
tgtttgcccaggacagcctagt

SEQ ID NO: 23968 - RNA, 22 nt, synthetic construct
  source 1..22: mol_type = other RNA
tgttttcctaggactgagggtt

SEQ ID NO: 23969 - RNA, 22 nt, synthetic construct
  source 1..22: mol_type = other RNA
tgttttcgtggctccctctgga

SEQ ID NO: 23970 - RNA, 22 nt, synthetic construct
  source 1..22: mol_type = other RNA
tgtttttccaaactgcttctcc

SEQ ID NO: 23971 - RNA, 22 nt, synthetic construct
  source 1..22: mol_type = other RNA
ttaaacagccagtggccagagg

SEQ ID NO: 23972 - RNA, 22 nt, synthetic construct
  source 1..22: mol_type = other RNA
ttaaacccagccaggtccttcc

SEQ ID NO: 23973 - RNA, 22 nt, synthetic construct
  source 1..22: mol_type = other RNA
ttaaagagtccccagtgctatc

SEQ ID NO: 23974 - RNA, 22 nt, synthetic construct
  source 1..22: mol_type = other RNA
ttaagatacgcctggttgccca

SEQ ID NO: 23975 - RNA, 22 nt, synthetic construct
  source 1..22: mol_type = other RNA
ttaaggaaagaaggatggagaa

SEQ ID NO: 23976 - RNA, 22 nt, synthetic construct
  source 1..22: mol_type = other RNA
ttaaggcaggaggggctggggg

SEQ ID NO: 23977 - RNA, 22 nt, synthetic construct
  source 1..22: mol_type = other RNA
ttacacttcccaagaggagaag

SEQ ID NO: 23978 - RNA, 22 nt, synthetic construct
  source 1..22: mol_type = other RNA
ttaccccccaagtccctcacct

SEQ ID NO: 23979 - RNA, 22 nt, synthetic construct
  source 1..22: mol_type = other RNA
ttacctgtgagataaggccagt

SEQ ID NO: 23980 - RNA, 22 nt, synthetic construct
  source 1..22: mol_type = other RNA
ttacgtggccaagaagcagggg

SEQ ID NO: 23981 - RNA, 22 nt, synthetic construct
  source 1..22: mol_type = other RNA
ttagaactcaggaccaacttat

SEQ ID NO: 23982 - RNA, 22 nt, synthetic construct
  source 1..22: mol_type = other RNA
ttagacacggcaaaacccccgt

SEQ ID NO: 23983 - RNA, 22 nt, synthetic construct
  source 1..22: mol_type = other RNA
ttagcactgaaaccctcagtcc

SEQ ID NO: 23984 - RNA, 22 nt, synthetic construct
  source 1..22: mol_type = other RNA
ttagcttcactccttcctcagc

SEQ ID NO: 23985 - RNA, 22 nt, synthetic construct
  source 1..22: mol_type = other RNA
ttagggaagcgggaccctgctc

SEQ ID NO: 23986 - RNA, 22 nt, synthetic construct
  source 1..22: mol_type = other RNA
ttagggaggcggggctgggcct

SEQ ID NO: 23987 - RNA, 22 nt, synthetic construct
  source 1..22: mol_type = other RNA
ttagggctgaacagagaagagc

SEQ ID NO: 23988 - RNA, 22 nt, synthetic construct
  source 1..22: mol_type = other RNA
ttaggggtccaaaacttggggg

SEQ ID NO: 23989 - RNA, 22 nt, synthetic construct
  source 1..22: mol_type = other RNA
ttagggtaccccacgtgggttt

SEQ ID NO: 23990 - RNA, 22 nt, synthetic construct
  source 1..22: mol_type = other RNA
ttagtggctagggggttggggg

SEQ ID NO: 23991 - RNA, 22 nt, synthetic construct
  source 1..22: mol_type = other RNA
ttatattgttcctccgtgcgtc

SEQ ID NO: 23992 - RNA, 22 nt, synthetic construct
  source 1..22: mol_type = other RNA
ttatcaaccacttggtgaggct

SEQ ID NO: 23993 - RNA, 22 nt, synthetic construct
  source 1..22: mol_type = other RNA
ttatcccgtggatctaggagtt

SEQ ID NO: 23994 - RNA, 22 nt, synthetic construct
  source 1..22: mol_type = other RNA
ttatctcacaggtaaaactgac

SEQ ID NO: 23995 - RNA, 22 nt, synthetic construct
  source 1..22: mol_type = other RNA
ttatgctgtttgcccaggacag

SEQ ID NO: 23996 - RNA, 22 nt, synthetic construct
  source 1..22: mol_type = other RNA
ttattctgattttgtttttcca

SEQ ID NO: 23997 - RNA, 22 nt, synthetic construct
  source 1..22: mol_type = other RNA
ttatttccacccagttgtcatg

SEQ ID NO: 23998 - RNA, 22 nt, synthetic construct
  source 1..22: mol_type = other RNA
ttcaacccaggaggccaggccc

SEQ ID NO: 23999 - RNA, 22 nt, synthetic construct
  source 1..22: mol_type = other RNA
ttcaaggacctgcccagtacag

SEQ ID NO: 24000 - RNA, 22 nt, synthetic construct
  source 1..22: mol_type = other RNA
ttcacagcccgagtttccatga

SEQ ID NO: 24001 - RNA, 22 nt, synthetic construct
  source 1..22: mol_type = other RNA
ttcacagggatgcctgtactgg

SEQ ID NO: 24002 - RNA, 22 nt, synthetic construct
  source 1..22: mol_type = other RNA
ttcaccaggtcgtggccgcctc

SEQ ID NO: 24003 - RNA, 22 nt, synthetic construct
  source 1..22: mol_type = other RNA
ttcacctttctagtccccaatt

SEQ ID NO: 24004 - RNA, 22 nt, synthetic construct
  source 1..22: mol_type = other RNA
ttcactccttcctcagctccag

SEQ ID NO: 24005 - RNA, 22 nt, synthetic construct
  source 1..22: mol_type = other RNA
ttcactgaggccccctctgcac

SEQ ID NO: 24006 - RNA, 22 nt, synthetic construct
  source 1..22: mol_type = other RNA
ttcactgatcctggtgctgcag

SEQ ID NO: 24007 - RNA, 22 nt, synthetic construct
  source 1..22: mol_type = other RNA
ttcacttcctgtttgcagatag

SEQ ID NO: 24008 - RNA, 22 nt, synthetic construct
  source 1..22: mol_type = other RNA
ttcagacccaggggtccaggcc

SEQ ID NO: 24009 - RNA, 22 nt, synthetic construct
  source 1..22: mol_type = other RNA
ttcagactgagccccgttcccc

SEQ ID NO: 24010 - RNA, 22 nt, synthetic construct
  source 1..22: mol_type = other RNA
ttcagagaggagggattccctt

SEQ ID NO: 24011 - RNA, 22 nt, synthetic construct
  source 1..22: mol_type = other RNA
ttcagagccaggagtcctggcc

SEQ ID NO: 24012 - RNA, 22 nt, synthetic construct
  source 1..22: mol_type = other RNA
ttcagccctaagaatcctggct

SEQ ID NO: 24013 - RNA, 22 nt, synthetic construct
  source 1..22: mol_type = other RNA
ttcaggtcccggagcccaccca

SEQ ID NO: 24014 - RNA, 22 nt, synthetic construct
  source 1..22: mol_type = other RNA
ttcagtgctaaaactaggctgt

SEQ ID NO: 24015 - RNA, 22 nt, synthetic construct
  source 1..22: mol_type = other RNA
ttcagtgctcagtggaaaccac

SEQ ID NO: 24016 - RNA, 22 nt, synthetic construct
  source 1..22: mol_type = other RNA
ttcatcccgttcccagggcacg

SEQ ID NO: 24017 - RNA, 22 nt, synthetic construct
  source 1..22: mol_type = other RNA
ttcatctgagggcggaagggct

SEQ ID NO: 24018 - RNA, 22 nt, synthetic construct
  source 1..22: mol_type = other RNA
ttccaaactgcttctcctcttg

SEQ ID NO: 24019 - RNA, 22 nt, synthetic construct
  source 1..22: mol_type = other RNA
ttccaagggtcaagctcggaaa

SEQ ID NO: 24020 - RNA, 22 nt, synthetic construct
  source 1..22: mol_type = other RNA
ttccacacggacacccccctcc

SEQ ID NO: 24021 - RNA, 22 nt, synthetic construct
  source 1..22: mol_type = other RNA
ttccacccagttgtcatggcga

SEQ ID NO: 24022 - RNA, 22 nt, synthetic construct
  source 1..22: mol_type = other RNA
ttccactgagcactgaaggcct

SEQ ID NO: 24023 - RNA, 22 nt, synthetic construct
  source 1..22: mol_type = other RNA
ttccagcccctcctccttcaga

SEQ ID NO: 24024 - RNA, 22 nt, synthetic construct
  source 1..22: mol_type = other RNA
ttccagtgctcagactagggaa

SEQ ID NO: 24025 - RNA, 22 nt, synthetic construct
  source 1..22: mol_type = other RNA
ttccatgacctcatgctcttgg

SEQ ID NO: 24026 - RNA, 22 nt, synthetic construct
  source 1..22: mol_type = other RNA
ttcccaagaggagaagcagttt

SEQ ID NO: 24027 - RNA, 22 nt, synthetic construct
  source 1..22: mol_type = other RNA
ttcccaagttcttagggtaccc

SEQ ID NO: 24028 - RNA, 22 nt, synthetic construct
  source 1..22: mol_type = other RNA
ttcccagggcacgtgcggcccc

SEQ ID NO: 24029 - RNA, 22 nt, synthetic construct
  source 1..22: mol_type = other RNA
ttccccactgtcctagcaccgt

SEQ ID NO: 24030 - RNA, 22 nt, synthetic construct
  source 1..22: mol_type = other RNA
ttccccgttcacttcctgtttg

SEQ ID NO: 24031 - RNA, 22 nt, synthetic construct
  source 1..22: mol_type = other RNA
ttcccctgcatcccccagaggc

SEQ ID NO: 24032 - RNA, 22 nt, synthetic construct
  source 1..22: mol_type = other RNA
ttcccctgcatcccccttcccc

SEQ ID NO: 24033 - RNA, 22 nt, synthetic construct
  source 1..22: mol_type = other RNA
ttcccctgcatccccgttcccc

SEQ ID NO: 24034 - RNA, 22 nt, synthetic construct
  source 1..22: mol_type = other RNA
ttcccgcacccagatgagaagc

SEQ ID NO: 24035 - RNA, 22 nt, synthetic construct
  source 1..22: mol_type = other RNA
ttcccggccagtttctccacct

SEQ ID NO: 24036 - RNA, 22 nt, synthetic construct
  source 1..22: mol_type = other RNA
ttccctaaggccctgctctggg

SEQ ID NO: 24037 - RNA, 22 nt, synthetic construct
  source 1..22: mol_type = other RNA
ttccctacaggggttcctggct

SEQ ID NO: 24038 - RNA, 22 nt, synthetic construct
  source 1..22: mol_type = other RNA
ttccctagtctgagcactggaa

SEQ ID NO: 24039 - RNA, 22 nt, synthetic construct
  source 1..22: mol_type = other RNA
ttccctgtcccccttcctcgtc

SEQ ID NO: 24040 - RNA, 22 nt, synthetic construct
  source 1..22: mol_type = other RNA
ttcccttaggggtccaaaactt

SEQ ID NO: 24041 - RNA, 22 nt, synthetic construct
  source 1..22: mol_type = other RNA
ttcccttctcaggttacgtggc

SEQ ID NO: 24042 - RNA, 22 nt, synthetic construct
  source 1..22: mol_type = other RNA
ttccctttcaaggacctgccca

SEQ ID NO: 24043 - RNA, 22 nt, synthetic construct
  source 1..22: mol_type = other RNA
ttccgagcttgacccttggaag

SEQ ID NO: 24044 - RNA, 22 nt, synthetic construct
  source 1..22: mol_type = other RNA
ttccgccctcagatgaaggagt

SEQ ID NO: 24045 - RNA, 22 nt, synthetic construct
  source 1..22: mol_type = other RNA
ttcctaggactgagggtttcag

SEQ ID NO: 24046 - RNA, 22 nt, synthetic construct
  source 1..22: mol_type = other RNA
ttcctcagctccagttcaggtc

SEQ ID NO: 24047 - RNA, 22 nt, synthetic construct
  source 1..22: mol_type = other RNA
ttcctccaccctgcatagccct

SEQ ID NO: 24048 - RNA, 22 nt, synthetic construct
  source 1..22: mol_type = other RNA
ttcctccgcccagagcagggtc

SEQ ID NO: 24049 - RNA, 22 nt, synthetic construct
  source 1..22: mol_type = other RNA
ttcctccgtgcgtcagttttac

SEQ ID NO: 24050 - RNA, 22 nt, synthetic construct
  source 1..22: mol_type = other RNA
ttcctcgtccaccatctcatgc

SEQ ID NO: 24051 - RNA, 22 nt, synthetic construct
  source 1..22: mol_type = other RNA
ttcctgcaccccaattgcctta

SEQ ID NO: 24052 - RNA, 22 nt, synthetic construct
  source 1..22: mol_type = other RNA
ttcctgcagagtatctgctggg

SEQ ID NO: 24053 - RNA, 22 nt, synthetic construct
  source 1..22: mol_type = other RNA
ttcctggctctgctcttcagac

SEQ ID NO: 24054 - RNA, 22 nt, synthetic construct
  source 1..22: mol_type = other RNA
ttcctgtttgcagatagccagg

SEQ ID NO: 24055 - RNA, 22 nt, synthetic construct
  source 1..22: mol_type = other RNA
ttccttaaagagtccccagtgc

SEQ ID NO: 24056 - RNA, 22 nt, synthetic construct
  source 1..22: mol_type = other RNA
ttccttacacttcccaagagga

SEQ ID NO: 24057 - RNA, 22 nt, synthetic construct
  source 1..22: mol_type = other RNA
ttcggcttttgtccccccaagt

SEQ ID NO: 24058 - RNA, 22 nt, synthetic construct
  source 1..22: mol_type = other RNA
ttcggggtatcccaggaggcct

SEQ ID NO: 24059 - RNA, 22 nt, synthetic construct
  source 1..22: mol_type = other RNA
ttcgtggctccctctggagtcc

SEQ ID NO: 24060 - RNA, 22 nt, synthetic construct
  source 1..22: mol_type = other RNA
ttcgtggtttccactgagcact

SEQ ID NO: 24061 - RNA, 22 nt, synthetic construct
  source 1..22: mol_type = other RNA
ttcgttcctgcagagtatctgc

SEQ ID NO: 24062 - RNA, 22 nt, synthetic construct
  source 1..22: mol_type = other RNA
ttctaactttggctcttcacct

SEQ ID NO: 24063 - RNA, 22 nt, synthetic construct
  source 1..22: mol_type = other RNA
ttctagtccccaatttatattg

SEQ ID NO: 24064 - RNA, 22 nt, synthetic construct
  source 1..22: mol_type = other RNA
ttctcacaaagggagttttcca

SEQ ID NO: 24065 - RNA, 22 nt, synthetic construct
  source 1..22: mol_type = other RNA
ttctcaggttacgtggccaaga

SEQ ID NO: 24066 - RNA, 22 nt, synthetic construct
  source 1..22: mol_type = other RNA
ttctcagtggccaccctgcgct

SEQ ID NO: 24067 - RNA, 22 nt, synthetic construct
  source 1..22: mol_type = other RNA
ttctcatctgggtgcgggaacc

SEQ ID NO: 24068 - RNA, 22 nt, synthetic construct
  source 1..22: mol_type = other RNA
ttctcattcttcccttaggggt

SEQ ID NO: 24069 - RNA, 22 nt, synthetic construct
  source 1..22: mol_type = other RNA
ttctccacctggggctgtgttt

SEQ ID NO: 24070 - RNA, 22 nt, synthetic construct
  source 1..22: mol_type = other RNA
ttctccaggcaggtccccaagc

SEQ ID NO: 24071 - RNA, 22 nt, synthetic construct
  source 1..22: mol_type = other RNA
ttctccatccttctttccttaa

SEQ ID NO: 24072 - RNA, 22 nt, synthetic construct
  source 1..22: mol_type = other RNA
ttctcctccaactgtggggtga

SEQ ID NO: 24073 - RNA, 22 nt, synthetic construct
  source 1..22: mol_type = other RNA
ttctcctcttgggaagtgtaag

SEQ ID NO: 24074 - RNA, 22 nt, synthetic construct
  source 1..22: mol_type = other RNA
ttctcgtcctgcatccttctcc

SEQ ID NO: 24075 - RNA, 22 nt, synthetic construct
  source 1..22: mol_type = other RNA
ttctctgttcagccctaagaat

SEQ ID NO: 24076 - RNA, 22 nt, synthetic construct
  source 1..22: mol_type = other RNA
ttctctttctccatccttcttt

SEQ ID NO: 24077 - RNA, 22 nt, synthetic construct
  source 1..22: mol_type = other RNA
ttctgattttgtttttccaaac

SEQ ID NO: 24078 - RNA, 22 nt, synthetic construct
  source 1..22: mol_type = other RNA
ttctgggagagggtagcgcagg

SEQ ID NO: 24079 - RNA, 22 nt, synthetic construct
  source 1..22: mol_type = other RNA
ttctgggtcttagggaggcggg

SEQ ID NO: 24080 - RNA, 22 nt, synthetic construct
  source 1..22: mol_type = other RNA
ttctgggtttgagtccttggca

SEQ ID NO: 24081 - RNA, 22 nt, synthetic construct
  source 1..22: mol_type = other RNA
ttcttagggctgaacagagaag

SEQ ID NO: 24082 - RNA, 22 nt, synthetic construct
  source 1..22: mol_type = other RNA
ttcttagggtaccccacgtggg

SEQ ID NO: 24083 - RNA, 22 nt, synthetic construct
  source 1..22: mol_type = other RNA
ttcttcccttaggggtccaaaa

SEQ ID NO: 24084 - RNA, 22 nt, synthetic construct
  source 1..22: mol_type = other RNA
ttcttggccacgtaacctgaga

SEQ ID NO: 24085 - RNA, 22 nt, synthetic construct
  source 1..22: mol_type = other RNA
ttctttccttaaagagtcccca

SEQ ID NO: 24086 - RNA, 22 nt, synthetic construct
  source 1..22: mol_type = other RNA
ttgaaagggaaaggcccattgc

SEQ ID NO: 24087 - RNA, 22 nt, synthetic construct
  source 1..22: mol_type = other RNA
ttgaatggggaggggttgggcc

SEQ ID NO: 24088 - RNA, 22 nt, synthetic construct
  source 1..22: mol_type = other RNA
ttgacccttggaaggacctggc

SEQ ID NO: 24089 - RNA, 22 nt, synthetic construct
  source 1..22: mol_type = other RNA
ttgagagaggaggggctggggc

SEQ ID NO: 24090 - RNA, 22 nt, synthetic construct
  source 1..22: mol_type = other RNA
ttgagtccttggcaagcccagg

SEQ ID NO: 24091 - RNA, 22 nt, synthetic construct
  source 1..22: mol_type = other RNA
ttgataaacccacgtggggtac

SEQ ID NO: 24092 - RNA, 22 nt, synthetic construct
  source 1..22: mol_type = other RNA
ttgattcccggccagtttctcc

SEQ ID NO: 24093 - RNA, 22 nt, synthetic construct
  source 1..22: mol_type = other RNA
ttgcagatagccaggagtcctt

SEQ ID NO: 24094 - RNA, 22 nt, synthetic construct
  source 1..22: mol_type = other RNA
ttgccaagcagtcaccccacag

SEQ ID NO: 24095 - RNA, 22 nt, synthetic construct
  source 1..22: mol_type = other RNA
ttgccaaggactcaaacccaga

SEQ ID NO: 24096 - RNA, 22 nt, synthetic construct
  source 1..22: mol_type = other RNA
ttgcccaggacagcctagtttt

SEQ ID NO: 24097 - RNA, 22 nt, synthetic construct
  source 1..22: mol_type = other RNA
ttgcccagtggtcaggccggcc

SEQ ID NO: 24098 - RNA, 22 nt, synthetic construct
  source 1..22: mol_type = other RNA
ttgccccaggccttgtggacac

SEQ ID NO: 24099 - RNA, 22 nt, synthetic construct
  source 1..22: mol_type = other RNA
ttgcccccctcccctatcgcca

SEQ ID NO: 24100 - RNA, 22 nt, synthetic construct
  source 1..22: mol_type = other RNA
ttgccgtgtctaacaggtacca

SEQ ID NO: 24101 - RNA, 22 nt, synthetic construct
  source 1..22: mol_type = other RNA
ttgccttagtggctagggggtt

SEQ ID NO: 24102 - RNA, 22 nt, synthetic construct
  source 1..22: mol_type = other RNA
ttgctctccttgcccccctccc

SEQ ID NO: 24103 - RNA, 22 nt, synthetic construct
  source 1..22: mol_type = other RNA
ttggaaaaacaaaatcagaata

SEQ ID NO: 24104 - RNA, 22 nt, synthetic construct
  source 1..22: mol_type = other RNA
ttggaaggacctggctgggttt

SEQ ID NO: 24105 - RNA, 22 nt, synthetic construct
  source 1..22: mol_type = other RNA
ttggacccctaagggaagaatg

SEQ ID NO: 24106 - RNA, 22 nt, synthetic construct
  source 1..22: mol_type = other RNA
ttggagaggtgagggacttggg

SEQ ID NO: 24107 - RNA, 22 nt, synthetic construct
  source 1..22: mol_type = other RNA
ttggaggagaatccacccaaaa

SEQ ID NO: 24108 - RNA, 22 nt, synthetic construct
  source 1..22: mol_type = other RNA
ttggcaaactcactcttcgggg

SEQ ID NO: 24109 - RNA, 22 nt, synthetic construct
  source 1..22: mol_type = other RNA
ttggcaagcccaggagaggcgc

SEQ ID NO: 24110 - RNA, 22 nt, synthetic construct
  source 1..22: mol_type = other RNA
ttggccacgtaacctgagaagg

SEQ ID NO: 24111 - RNA, 22 nt, synthetic construct
  source 1..22: mol_type = other RNA
ttggccctcgtagctccctccc

SEQ ID NO: 24112 - RNA, 22 nt, synthetic construct
  source 1..22: mol_type = other RNA
ttggcctggaccccacgagagg

SEQ ID NO: 24113 - RNA, 22 nt, synthetic construct
  source 1..22: mol_type = other RNA
ttggctcttcacctttctagtc

SEQ ID NO: 24114 - RNA, 22 nt, synthetic construct
  source 1..22: mol_type = other RNA
ttgggaacagccacagcagggg

SEQ ID NO: 24115 - RNA, 22 nt, synthetic construct
  source 1..22: mol_type = other RNA
ttgggaagtgtaaggaagctgc

SEQ ID NO: 24116 - RNA, 22 nt, synthetic construct
  source 1..22: mol_type = other RNA
ttgggcctggactctggagtcc

SEQ ID NO: 24117 - RNA, 22 nt, synthetic construct
  source 1..22: mol_type = other RNA
ttggggacctgcctggagaagg

SEQ ID NO: 24118 - RNA, 22 nt, synthetic construct
  source 1..22: mol_type = other RNA
ttggggactagaaaggtgaaga

SEQ ID NO: 24119 - RNA, 22 nt, synthetic construct
  source 1..22: mol_type = other RNA
ttgggggctagagtaggagggg

SEQ ID NO: 24120 - RNA, 22 nt, synthetic construct
  source 1..22: mol_type = other RNA
ttggggggacaaaagccgaagt

SEQ ID NO: 24121 - RNA, 22 nt, synthetic construct
  source 1..22: mol_type = other RNA
ttggggggtaatttatcccgtg

SEQ ID NO: 24122 - RNA, 22 nt, synthetic construct
  source 1..22: mol_type = other RNA
ttggggtgcaggaatgggggca

SEQ ID NO: 24123 - RNA, 22 nt, synthetic construct
  source 1..22: mol_type = other RNA
ttggggtgggctggggttcaga

SEQ ID NO: 24124 - RNA, 22 nt, synthetic construct
  source 1..22: mol_type = other RNA
ttgggtcaggtctgggtgtggg

SEQ ID NO: 24125 - RNA, 22 nt, synthetic construct
  source 1..22: mol_type = other RNA
ttgggtcattttccccactgtc

SEQ ID NO: 24126 - RNA, 22 nt, synthetic construct
  source 1..22: mol_type = other RNA
ttgggtggattctcctccaact

SEQ ID NO: 24127 - RNA, 22 nt, synthetic construct
  source 1..22: mol_type = other RNA
ttggtcactgtctctgggtgac

SEQ ID NO: 24128 - RNA, 22 nt, synthetic construct
  source 1..22: mol_type = other RNA
ttggtcctgagttctaactttg

SEQ ID NO: 24129 - RNA, 22 nt, synthetic construct
  source 1..22: mol_type = other RNA
ttggtgaggctggtaccctgcc

SEQ ID NO: 24130 - RNA, 22 nt, synthetic construct
  source 1..22: mol_type = other RNA
ttgtcatggcgataggggaggg

SEQ ID NO: 24131 - RNA, 22 nt, synthetic construct
  source 1..22: mol_type = other RNA
ttgtccccccaagttttggacc

SEQ ID NO: 24132 - RNA, 22 nt, synthetic construct
  source 1..22: mol_type = other RNA
ttgtgagaatggtgcgtcctag

SEQ ID NO: 24133 - RNA, 22 nt, synthetic construct
  source 1..22: mol_type = other RNA
ttgtggacactgggtgggctcc

SEQ ID NO: 24134 - RNA, 22 nt, synthetic construct
  source 1..22: mol_type = other RNA
ttgttcctccgtgcgtcagttt

SEQ ID NO: 24135 - RNA, 22 nt, synthetic construct
  source 1..22: mol_type = other RNA
ttgtttttccaaactgcttctc

SEQ ID NO: 24136 - RNA, 22 nt, synthetic construct
  source 1..22: mol_type = other RNA
tttaagatacgcctggttgccc

SEQ ID NO: 24137 - RNA, 22 nt, synthetic construct
  source 1..22: mol_type = other RNA
tttaaggaaagaaggatggaga

SEQ ID NO: 24138 - RNA, 22 nt, synthetic construct
  source 1..22: mol_type = other RNA
tttaaggcaggaggggctgggg

SEQ ID NO: 24139 - RNA, 22 nt, synthetic construct
  source 1..22: mol_type = other RNA
tttacctgtgagataaggccag

SEQ ID NO: 24140 - RNA, 22 nt, synthetic construct
  source 1..22: mol_type = other RNA
tttagcactgaaaccctcagtc

SEQ ID NO: 24141 - RNA, 22 nt, synthetic construct
  source 1..22: mol_type = other RNA
tttagcttcactccttcctcag

SEQ ID NO: 24142 - RNA, 22 nt, synthetic construct
  source 1..22: mol_type = other RNA
tttatattgttcctccgtgcgt

SEQ ID NO: 24143 - RNA, 22 nt, synthetic construct
  source 1..22: mol_type = other RNA
tttatcaaccacttggtgaggc

SEQ ID NO: 24144 - RNA, 22 nt, synthetic construct
  source 1..22: mol_type = other RNA
tttatcccgtggatctaggagt

SEQ ID NO: 24145 - RNA, 22 nt, synthetic construct
  source 1..22: mol_type = other RNA
tttatttccacccagttgtcat

SEQ ID NO: 24146 - RNA, 22 nt, synthetic construct
  source 1..22: mol_type = other RNA
tttcaaggacctgcccagtaca

SEQ ID NO: 24147 - RNA, 22 nt, synthetic construct
  source 1..22: mol_type = other RNA
tttcacagggatgcctgtactg

SEQ ID NO: 24148 - RNA, 22 nt, synthetic construct
  source 1..22: mol_type = other RNA
tttcactgatcctggtgctgca

SEQ ID NO: 24149 - RNA, 22 nt, synthetic construct
  source 1..22: mol_type = other RNA
tttcagtgctaaaactaggctg

SEQ ID NO: 24150 - RNA, 22 nt, synthetic construct
  source 1..22: mol_type = other RNA
tttccaaactgcttctcctctt

SEQ ID NO: 24151 - RNA, 22 nt, synthetic construct
  source 1..22: mol_type = other RNA
tttccacacggacacccccctc

SEQ ID NO: 24152 - RNA, 22 nt, synthetic construct
  source 1..22: mol_type = other RNA
tttccacccagttgtcatggcg

SEQ ID NO: 24153 - RNA, 22 nt, synthetic construct
  source 1..22: mol_type = other RNA
tttccactgagcactgaaggcc

SEQ ID NO: 24154 - RNA, 22 nt, synthetic construct
  source 1..22: mol_type = other RNA
tttccatgacctcatgctcttg

SEQ ID NO: 24155 - RNA, 22 nt, synthetic construct
  source 1..22: mol_type = other RNA
tttccccactgtcctagcaccg

SEQ ID NO: 24156 - RNA, 22 nt, synthetic construct
  source 1..22: mol_type = other RNA
tttccctttcaaggacctgccc

SEQ ID NO: 24157 - RNA, 22 nt, synthetic construct
  source 1..22: mol_type = other RNA
tttccgagcttgacccttggaa

SEQ ID NO: 24158 - RNA, 22 nt, synthetic construct
  source 1..22: mol_type = other RNA
tttcctaggactgagggtttca

SEQ ID NO: 24159 - RNA, 22 nt, synthetic construct
  source 1..22: mol_type = other RNA
tttccttaaagagtccccagtg

SEQ ID NO: 24160 - RNA, 22 nt, synthetic construct
  source 1..22: mol_type = other RNA
tttcgtggctccctctggagtc

SEQ ID NO: 24161 - RNA, 22 nt, synthetic construct
  source 1..22: mol_type = other RNA
tttcgtggtttccactgagcac

SEQ ID NO: 24162 - RNA, 22 nt, synthetic construct
  source 1..22: mol_type = other RNA
tttctagtccccaatttatatt

SEQ ID NO: 24163 - RNA, 22 nt, synthetic construct
  source 1..22: mol_type = other RNA
tttctcattcttcccttagggg

SEQ ID NO: 24164 - RNA, 22 nt, synthetic construct
  source 1..22: mol_type = other RNA
tttctccacctggggctgtgtt

SEQ ID NO: 24165 - RNA, 22 nt, synthetic construct
  source 1..22: mol_type = other RNA
tttctccatccttctttcctta

SEQ ID NO: 24166 - RNA, 22 nt, synthetic construct
  source 1..22: mol_type = other RNA
tttctcgtcctgcatccttctc

SEQ ID NO: 24167 - RNA, 22 nt, synthetic construct
  source 1..22: mol_type = other RNA
tttctctttctccatccttctt

SEQ ID NO: 24168 - RNA, 22 nt, synthetic construct
  source 1..22: mol_type = other RNA
tttgagagaggaggggctgggg

SEQ ID NO: 24169 - RNA, 22 nt, synthetic construct
  source 1..22: mol_type = other RNA
tttgagtccttggcaagcccag

SEQ ID NO: 24170 - RNA, 22 nt, synthetic construct
  source 1..22: mol_type = other RNA
tttgcagatagccaggagtcct

SEQ ID NO: 24171 - RNA, 22 nt, synthetic construct
  source 1..22: mol_type = other RNA
tttgccaagcagtcaccccaca

SEQ ID NO: 24172 - RNA, 22 nt, synthetic construct
  source 1..22: mol_type = other RNA
tttgcccaggacagcctagttt

SEQ ID NO: 24173 - RNA, 22 nt, synthetic construct
  source 1..22: mol_type = other RNA
tttgccgtgtctaacaggtacc

SEQ ID NO: 24174 - RNA, 22 nt, synthetic construct
  source 1..22: mol_type = other RNA
tttggaaaaacaaaatcagaat

SEQ ID NO: 24175 - RNA, 22 nt, synthetic construct
  source 1..22: mol_type = other RNA
tttggacccctaagggaagaat

SEQ ID NO: 24176 - RNA, 22 nt, synthetic construct
  source 1..22: mol_type = other RNA
tttggagaggtgagggacttgg

SEQ ID NO: 24177 - RNA, 22 nt, synthetic construct
  source 1..22: mol_type = other RNA
tttggctcttcacctttctagt

SEQ ID NO: 24178 - RNA, 22 nt, synthetic construct
  source 1..22: mol_type = other RNA
tttgggtcaggtctgggtgtgg

SEQ ID NO: 24179 - RNA, 22 nt, synthetic construct
  source 1..22: mol_type = other RNA
tttgggtggattctcctccaac

SEQ ID NO: 24180 - RNA, 22 nt, synthetic construct
  source 1..22: mol_type = other RNA
tttgtccccccaagttttggac

SEQ ID NO: 24181 - RNA, 22 nt, synthetic construct
  source 1..22: mol_type = other RNA
tttgtgagaatggtgcgtccta

SEQ ID NO: 24182 - RNA, 22 nt, synthetic construct
  source 1..22: mol_type = other RNA
tttgtttttccaaactgcttct

SEQ ID NO: 24183 - RNA, 22 nt, synthetic construct
  source 1..22: mol_type = other RNA
ttttacctgtgagataaggcca

SEQ ID NO: 24184 - RNA, 22 nt, synthetic construct
  source 1..22: mol_type = other RNA
ttttagcactgaaaccctcagt

SEQ ID NO: 24185 - RNA, 22 nt, synthetic construct
  source 1..22: mol_type = other RNA
ttttccaaactgcttctcctct

SEQ ID NO: 24186 - RNA, 22 nt, synthetic construct
  source 1..22: mol_type = other RNA
ttttccacacggacacccccct

SEQ ID NO: 24187 - RNA, 22 nt, synthetic construct
  source 1..22: mol_type = other RNA
ttttccccactgtcctagcacc

SEQ ID NO: 24188 - RNA, 22 nt, synthetic construct
  source 1..22: mol_type = other RNA
ttttcctaggactgagggtttc

SEQ ID NO: 24189 - RNA, 22 nt, synthetic construct
  source 1..22: mol_type = other RNA
ttttcgtggctccctctggagt

SEQ ID NO: 24190 - RNA, 22 nt, synthetic construct
  source 1..22: mol_type = other RNA
ttttgccgtgtctaacaggtac

SEQ ID NO: 24191 - RNA, 22 nt, synthetic construct
  source 1..22: mol_type = other RNA
ttttggacccctaagggaagaa

SEQ ID NO: 24192 - RNA, 22 nt, synthetic construct
  source 1..22: mol_type = other RNA
ttttgggtggattctcctccaa

SEQ ID NO: 24193 - RNA, 22 nt, synthetic construct
  source 1..22: mol_type = other RNA
ttttgtccccccaagttttgga

SEQ ID NO: 24194 - RNA, 22 nt, synthetic construct
  source 1..22: mol_type = other RNA
ttttgtttttccaaactgcttc

SEQ ID NO: 24195 - RNA, 22 nt, synthetic construct
  source 1..22: mol_type = other RNA
tttttccaaactgcttctcctc

SEQ ID NO: 24196 - RNA, 20 nt, synthetic construct
  source 1..20: mol_type = other RNA
aaaaaaatgtacttggttcc

SEQ ID NO: 24197 - RNA, 17 nt, synthetic construct
  source 1..17: mol_type = other RNA
aaaatgtacttggttcc

SEQ ID NO: 24198 - RNA, 17 nt, synthetic construct
  source 1..17: mol_type = other RNA
aaaaatgtacttggttc

SEQ ID NO: 24199 - RNA, 17 nt, synthetic construct
  source 1..17: mol_type = other RNA
aaaaaatgtacttggtt

SEQ ID NO: 24200 - RNA, 17 nt, synthetic construct
  source 1..17: mol_type = other RNA
aaaaaaatgtacttggt